(19) United States
(12) Patent Application Publication
(10) Pub. No.: US 2020/0223906 A1
(43) Pub. Date: Jul. 16, 2020

(54) ANTI-RESPIRATORY SYNCYTIAL VIRUS ANTIBODIES, AND METHODS OF THEIR GENERATION AND USE

(71) Applicant: X4 Pharmaceuticals, Inc, Cambridge, MA (US)

(72) Inventor: Laura M. Walker, Lebanon, NH (US)

(21) Appl. No.: 16/343,311

(22) PCT Filed: Oct. 20, 2017
(86) PCT No.: PCT/US17/57737

§ 371 Date: Apr. 18, 2019

Related U.S. Application Data
(60) Provisional application No. 62/411,508, filed on Oct. 21, 2016.

(51) Int. Cl. C07K 16/10

(52) U.S. Cl. CPC C07K 16/1027; C07K 2317/21; C07K 2317/33; A61K 2039/505; C07K 2317/565; C07K 2317/76; C07K 2317/92; C07K 2317/34

(57) ABSTRACT

Anti-RSV antibodies with neutralizing potency against RSV subtype A and RSV subtype B are provided, as well as methods for their identification, isolation, generation, and methods for their preparation and use are provided.

### CROSS REFERENCE TO RELATED APPLICATIONS

[0001] The present application claims the benefit of U.S. Provisional Patent Application No. 62/411,508, filed Oct. 21, 2016, the entire contents of which are incorporated herein by reference.

### SEQUENCE LISTING

[0002] The instant application contains a Sequence Listing which has been submitted electronically in ASCII format and is hereby incorporated by reference in its entirety. Said ASCII copy, created on Oct. 20, 2017, is named “2009186_0218_SL.TXT” and is 1,019,600 bytes in size.

### FIELD OF THE INVENTION

[0003] The invention relates, inter alia, to anti-Respiratory Syncytial Virus (RSV) antibodies and functional fragments thereof, nucleic acid sequences encoding such antibodies and methods and reagents for their preparation and use.

### BACKGROUND OF THE INVENTION

[0004] All references cited herein, including without limitation patents, patent applications, and non-patent references and publications referenced throughout are hereby expressly incorporated by reference in their entireties for all purposes.

[0005] Respiratory syncytial virus (RSV) causes substantial morbidity and mortality in young children and the elderly, is the leading cause of infant hospitalization in the United States and accounts for an estimated 64 million infections and 160,000 deaths world-wide each year. However, despite decades of research, the development of a safe and effective vaccines or therapeutic and/or prophylactic antibodies against RSV has remained elusive, highlighting the need for novel strategies that induce or provide protective immune responses. (1-3). Indeed, to date there are currently no approved RSV vaccines, and passive prophylaxis with the monoclonal antibody palivizumab (marketed as Synagis®) is restricted to high-risk infants in part due to its modest efficacy.

[0006] Certain populations of children are at risk for developing an RSV infection and these include preterm infants (Hall et al., 1979, New Engl. J. Med. 300:393-396), children with congenital malformations of the airway, children with bronchopulmonary dysplasia (Groothuis et al., 1988, Pediatrics 82:199-203), children with congenital heart disease (MacDonald et al., New Engl. J. Med. 307:397-400), and children with congenital or acquired immunodeficiency (Ogra et al., 1988, Pediatr. Infect. Dis. J. 7:246-249; and Pohl et al., 1992, J. Infect. Dis. 165:166-169), and cystic fibrosis (Abman et al., 1988, J. Pediatr. 1 13:826-830).

[0007] RSV can infect the adult population as well. In this population, RSV causes primarily an upper respiratory tract disease, although elderly patients may be at greater risk for a serious infection and pneumonia (Evans, A. S., eds., 1989, Viral Infections of Humans. Epidemiology and Control, 3^{rd} ed., Plenum Medical Book, New York at pages 525-544), as well as adults who are immunosuppressed, particularly bone marrow transplant patients (Hertz et al., 1989, Medicine 68:269-281). Other at risk patients include those suffering from congestive heart failure and those suffering from chronic obstructive pulmonary disease (i.e. COPD). There have also been reports of epidemics among nursing home patients and institutionalized young adults (Falsey, A. R., 1991 , Infect. Control Hosp. Epidemiol. 12:602-608; and Garvie et al., 1980, Br. Med. J. 281 :1253-1254).

[0008] While treatment options for established RSV disease are limited, more severe forms of the disease of the lower respiratory tract often require considerable supportive care, including administration of humidified oxygen and respiratory assistance (Fields et al., eds, 1990, Fields Virology, 2^{nd} ed., Vol. 1, Raven Press, New York at pages 1045-1072).

[0009] Similar to other pneumoviruses, RSV expresses two major surface glycoproteins: the fusion protein (F) and the attachment protein (G). Although both have been shown to induce protective neutralizing antibody responses, F is less genetically variable than G, is absolutely required for infection, and is the target for the majority of neutralizing activity in human serum (4-8). RSV F is also the target of the monoclonal antibody palivizumab, which is used to passively protect high-risk infants from severe disease (9). Consequently, the RSV F protein is considered to be a highly attractive target for vaccines and antibody-based therapies.

[0010] The mature RSV F glycoprotein initially exists in a metastable prefusion conformation (preF) (10), before undergoing a conformational change that leads to insertion of the hydrophobic fusion peptide into the host-cell membrane. Subsequent refolding of F into a stable, elongated postfusion conformation (postF) (11, 12) results in fusion of the viral and host-cell membranes. Due to its inherent instability, the preF protein has the propensity to prematurely trigger into postF, both in solution and on the viral surface (13). Recently, stabilization of preF has been achieved by protein engineering (14, 15), and stabilized preF has been shown to induce higher titers of neutralizing antibodies than postF in animal models (15).

[0011] Despite the importance of neutralizing antibodies in protection against severe RSV disease, our understanding of the human antibody response to RSV has been limited to studies of human sera and a small number of RSV-specific human monoclonal antibodies (16-19). The epitopes recognized by these human antibodies, as well as several murine antibodies, have defined at least four ‘antigenic sites’ on RSV F (1, 10, 16, 18-20) (see also, e.g, Table 1). Three of these sites—I, II, and IV—are present on both pre- and postF, whereas antigenic site Ø exists exclusively on preF. Additional preF-specific epitopes have been defined by antibodies MPE8 (17) and AM14 (21). Although serum mapping studies have shown that site Ø-directed antibodies are responsible for a large proportion of the neutralizing antibody response in most individuals (8), there are additional antibody specificities that contribute to serum neutralizing activity that remain to be defined. In addition, it was heretofore unknown whether certain antibody sequence features are required for recognition of certain neutralizing sites, as observed for other viral targets (22-25). Accordingly, understanding the relationship between neutralization potency and epitope specificity would be advantageous in the selection and/or design of vaccine antigens, as well as therapeutic and/or prophylactic antibodies, which induce potent neutralizing responses to RSV.

[0012] While treatment options for established RSV disease are limited, more severe forms of the disease of the lower respiratory tract often require considerable supportive care, including administration of humidified oxygen and respiratory assistance (Fields et al., eds, 1990, Fields Virology, 2^{nd} ed., Vol. 1 , Raven Press, New York at pages 1045-1072).

[0013] Ribavirin, which is the only drug approved for treatment of infection, has been shown to be effective in the treatment of pneumonia and bronchiolitis associated with RSV infection, and has been shown to modify the course of severe RSV disease in immunocompetent children (Smith et al., 1991, New Engl. J. Med. 325:24-29). The use of ribavirin is limited due to concerns surrounding its potential risk to pregnant women who may be exposed to the aerosolized drug while it is being administered in a hospital environment.

[0014] Similarly, while a vaccine may be useful, no commercially available vaccine has been developed to date. Several vaccine candidates have been abandoned and others are under development (Murphy et al., 1994, Virus Res. 32: 13-36). The development of a vaccine has proven to be problematic. In particular, immunization would be required in the immediate neonatal period since the peak incidence of lower respiratory tract disease occurs at 2-5 months of age. However, it is known that the neonatal immune response is immature at that time. Plus, the infant at that point in time still has high titers of maternally acquired RSV antibody, which might reduce vaccine immunogenicity (Murphy et al., 1988, J. Virol. 62:3907-3910; and Murphy et al., 1991, Vaccine 9:185-189).

[0015] Currently, the only approved approach to prophylaxis of RSV disease is passive immunization. For example, the humanized antibody, palivizumab (SYNAGIS®), which is specific for an epitope on the F protein, is approved for intramuscular administration to pediatric patients for prevention of serious lower respiratory tract disease caused by RSV at recommended monthly doses of 15 mg/kg of body weight throughout the RSV season (November through April in the northern hemisphere). SYNAGIS® is a composite of human (95%) and murine (5%) antibody sequences. (Johnson et al., (1997), J. Infect. Diseases 176:1215-1224 and U.S. Pat. No. 5,824,307).

[0016] Although SYNAGIS® has been successfully used for the prevention of RSV infection in pediatric patients, multiple intramuscular doses of 15 mg/kg of SYNAGIS® are required to achieve a prophylactic effect. The necessity for the administration of multiple intramuscular doses of antibody requires repeated visits to the doctor's office, which is not only inconvenient for the patient but can also result in missed doses.

[0017] Efforts were made to improve on the therapeutic profile of an anti-RSV-F antibody, and this lead to the identification and development of motavizumab, also referred to as NUMAX™. However, clinical testing revealed that certain of the patients being administered motavizumab were having severe hypersensitivity reactions. Further development of this humanized anti-RSV-F antibody was then discontinued.

[0018] Other antibodies to RSV-F protein have been described and can be found in U.S. Pat. Nos. 6,656,467; 5,824,307, 7,786,273; 7,670,600; 7,083,784; 6818216; 7700735; 7553489; 7,323,172; 7,229,619; 7,425,618; 7,740,851 ; 7,658,921; 7,704,505; 7,635,568; 6,855,493; 6,565,849; 7,582,297; 7,208,162; 7,700,720; 6,413,771; 5,811,524; 6,537,809; 5,762,905; 7,070,786; 7,364,742; 7,879,329; 7,488,477; 7,867,497 ; 553,441 6,835,372; 7,482,024; 7,691,603; 8,562,996; 8,568,726; 9,447,173; US20100015596; WO2009088159A1; and WO2014159822. To date, none other than SYNAGIS® has been approved by a regulatory agency for use in preventing an RSV infection.

[0019] There remains a need for the provision of highly specific, high affinity, and highly potent neutralizing anti-RSV antibodies and antigen-binding fragments thereof with neutralize at least one, but preferably both, of subtype A and subtype B RSV viral strains, and which preferentially recognize PreF relative to PostF conformations of the F protein. There also remains a need for the provision of anti-RSV and anti-HMPV cross-neutralizing antibodies and antigen-binding fragments thereof.

### SUMMARY OF THE INVENTION

[0020] Applicant has now discovered, isolated, and characterized, inter alia, an extensive panel of RSV F-specific monoclonal antibodies from the memory B cells of a healthy adult human donor and used these antibodies to comprehensively map the antigenic topology of RSV F. A large proportion of the RSV F-specific human antibody repertoire was advantageously comprised of antibodies with greatly enhanced specificity for the PreF conformation of the F protein (relative to the PostF form), many if not most of which exhibited remarkable potency in neutralization assays against one or both of RSV subtype A and RSV subtype B strains. Indeed, a large number of these antibodies display neutralization potencies that are multiple-fold greater—some 5- to 100-fold greater or more—to previous anti-RSV therapeutic antibodies, such as D25 and pavlizumamab thus serve as attractive therapeutic and/or prophylactic candidates for treating and/or preventing RSV infection and disease.

[0021] The most potent antibodies were found to target two distinct antigenic sites that are located near the apex of the preF trimer, providing strong support for the development of therapeutic and/or prophylactic antibodies targeting these antigenic sites, as well as preF-based vaccine candidates that preserve these antigenic sites. Furthermore, the neutralizing antibodies described and disclosed herein represent new opportunities for the prevention of severe RSV disease using passive immunoprophylaxis.

[0022] Given the role that the F protein plays in fusion of the virus with the cell and in cell to cell transmission of the virus, the antibodies described herein provide a method of inhibiting that process and as such, may be used for preventing infection of a patient exposed to, or at risk for acquiring an infection with RSV, or for treating and/or ameliorating one or more symptoms associated with RSV infection in a patient exposed to, or at risk for acquiring an infection with RSV, or suffering from infection with RSV. The antibodies and pharmaceutical compositions described herein may also be used to prevent or to treat an RSV infection in a patient who may experience a more severe form of the RSV infection due to an underlying or pre-existing medical condition. A patient who may benefit from treatment with an antibody and/or a pharmaceutical composition of the invention may be a pre-term infant, a full-term infant born during RSV season (approximately late fall (November) through early spring (April)) that is at risk because of other pre-existing or underlying medical conditions including congenital heart disease or chronic lung disease, a child greater than one year of age with or without an underlying medical condition, an institutionalized or hospitalized patient, or an elderly adult (>65 years of age) with or without an underlying medical condition, such as congestive heart failure (CHF), or chronic obstructive pulmonary disease (COPD). A patient who may benefit from such therapy may suffer from a medical condition resulting from a compromised pulmonary, cardiovascular, neuromuscular, or immune system. For example, the patient may suffer from an abnormality of the airway, or an airway malfunction, a chronic lung disease, a chronic or congenital heart disease, a neuromuscular disease that compromises the handling of respiratory secretions, or the patient may be immunosuppressed due to severe combined immunodeficiency disease or severe acquired immunodeficiency disease, or from any other underlying infectious disease or cancerous condition that results in immunosuppression, or the patient may be immunosuppressed due to treatment with an immunosuppressive drug (e.g. any drug used for treating a transplant patient) or radiation therapy. A patient who may benefit from the antibodies and/or pharmaceutical compositions of the invention may be a patient that suffers from chronic obstructive pulmonary disease (COPD), cystic fibrosis (CF), bronchopulmonary dysplasia, congestive heart failure (CHF), or congenital heart disease.

[0023] Because the inventive antibodies and antigen-binding fragments thereof are more effective at neutralization of RSV compared to known antibodies, lower doses of the antibodies or antibody fragments or pharmaceutical compositions of the invention could be used to achieve a greater level of protection against infection with RSV, and more effective treatment and/or amelioration of symptoms associated with an RSV infection. Accordingly, the use of lower doses of antibodies or fragments thereof which immunospecifically bind to RSV-F antigen and/or pharmaceutical compositions may result in fewer or less severe adverse events. Likewise, the use of more effective neutralizing antibodies may result in a diminished need for frequent administration of the antibodies or antibody fragments or pharmaceutical compositions than previously envisioned as necessary for the prevention of infection, or for virus neutralization, or for treatment or amelioration of one or more symptoms associated with an RSV infection. Symptoms of RSV infection may include a bluish skin color due to lack of oxygen (hypoxia), breathing difficulty (rapid breathing or shortness of breath), cough, croupy cough (“seal bark” cough), fever, nasal flaring, nasal congestion (stuffy nose), apnea, decreased appetite, dehydration, poor feeding, altered mental status, or wheezing.

[0024] Such antibodies or pharmaceutical compositions may be useful when administered prophylactically (prior to exposure to the virus and infection with the virus) to lessen the severity, or duration of a primary infection with RSV, or ameliorate at least one symptom associated with the infection. The antibodies or pharmaceutical compositions may be used alone or in conjunction with a second agent useful for treating an RSV infection. In certain embodiments, the antibodies or pharmaceutical compositions may be given therapeutically (after exposure to and infection with the virus) either alone, or in conjunction with a second agent to lessen the severity or duration of the primary infection, or to ameliorate at least one symptom associated with the infection. In certain embodiments, the antibodies or pharmaceutical compositions may be used prophylactically as stand-alone therapy to protect patients who are at risk for acquiring an infection with RSV, such as those described above. Any of these patient populations may benefit from treatment with the antibodies or pharmaceutical compositions of the invention, when given alone or in conjunction with a second agent, including for example, an anti-viral therapy, such as ribavirin, or other anti-viral vaccines.

[0025] The antibodies of the invention can be full-length (for example, an IgG1 or IgG4 antibody) or may comprise only an antigen-binding portion (for example, a Fab, F(ab′)₂ or scFv fragment), and may be modified to affect functionality, e.g., to eliminate residual effector functions (Reddy et al., (2000), J. Immunol. 164:1925-1933).

[0026] Accordingly, in certain embodiments are provided isolated antibodies or antigen-binding fragments thereof that specifically bind to Respiratory Syncytial Virus (RSV) F protein (F), wherein at least one, at least two, at least three, at least four, at least five, or at least six of the CDRH1, a CDRH2, a CDRH3, a CDRL1, a CDRL2, and CDRL3 amino acid sequence such antibodies or the antigen-binding fragments thereof are at least 70% identical; at least 75% identical; 80% identical; at least 85% identical; at least 90% identical; at least 95% identical; at least 96% identical; at least 97% identical; at least 98% identical; at least 99%; at least 100% and/or all percentages of identity in between; to at least one, at least two, at least three, at least four, at least five, or at least six of the CDRH1, a CDRH2, a CDRH3, a CDRL1, a CDRL2, and/or a CDRL3 amino acid sequences as disclosed in Table 6 of an antibody selected from Antibody Number 232 through Antibody Number 372 as disclosed in Table 6; and wherein said antibody or the antigen-binding fragment thereof also has one or more of the following characteristics: a) the antibodies or antigen-binding fragments thereof cross-compete with said antibodies or antigen-binding fragments thereof for binding to RSV-F; b) the antibodies or antigen-binding fragments thereof display better binding affinity for the PreF form of RSV-F relative to the PostF form; c) the antibodies or antigen-binding fragments thereof display a clean or low polyreactivity profile; d) the antibodies or antigen-binding fragments thereof display neutralization activity toward RSV subtype A and RSV subtype B in vitro; e) the antibodies or antigen-binding fragments thereof display antigenic site specificity for RSV-F at Site Ø, Site I, Site II, Site III, Site IV, or Site V f) the antibodies or antigen-binding fragments thereof display antigenic site specificity for RSV-F Site Ø, Site V, or Site III relative to RSV-F Site I, Site II, or Site IV; g) at least a portion of the epitope with which the antibodies or antigen-binding fragments thereof interact comprises the α3 helix and β3/β4 hairpin of PreF; h) the antibodies or antigen-binding fragments thereof display an in vitro neutralization potency (IC₅₀) of between about 0.5 microgram/milliliter (ug/ml) to about 5 ug/ml; between about 0.05 ug/ml to about 0.5 ug/ml; or less than about 0.05 mg/ml; i) the binding affinities and/or epitopic specificities of the antibodies or antigen-binding fragments thereof for any one of the RSV-F variants designated as 1, 2, 3, 4, 5, 6, 7, 8, 9, and DG in FIG. 7A is reduced or eliminated relative to the binding affinities and/or epitopic specificities of said antibodies or antigen-binding fragments thereof for the RSV-F or RSV-F DS-Cav1; j) the antibodies or antigen-binding fragments thereof display a cross-neutralization potency (IC₅₀) against human metapneumovirus (HMPV); k) the antibodies or antigen-binding fragments thereof do not complete with D25, MPE8, palivizumab, or motavizumab; or l) the antibodies or antigen-binding fragments thereof display at least about 2-fold; at least about 3-fold; at least about 4-fold; at least about 5-fold; at least about 6-fold; at least about 7-fold; at least about 8-fold; at least about 9-fold; at least about 10-fold; at least about 15-fold; at least about 20-fold; at least about 25-fold; at least about 30-fold; at least about 35-fold; at least about 40-fold; at least about 50-fold; at least about 55-fold; at least about 60-fold; at least about 70-fold; at least about 80-fold; at least about 90-fold; at least about 100-fold; greater than about 100-fold; and folds in between any of the foregoing; greater neutralization potency (IC50) than D25 and/or palivizumab.

[0027] In certain other embodiments, the isolated antibodies or antigen-binding fragments thereof comprise: at least two; at least three; at least 4; at least 5; at least 6; at least 7; at least 8; at least 9; at least 10; at least 11; or at least 12; of characteristics a) through 1) above.

[0028] In certain other embodiments, the isolated antibodies or antigen-binding fragments thereof comprise: a) the CDRH3 amino acid sequence of any one of the antibodies designated Antibody Number 232 through Antibody Number 372 as disclosed in Table 6; b) the CDRH2 amino acid sequence of any one of the antibodies designated Antibody Number 232 through Antibody Number 372 as disclosed in Table 6; c) the CDRH1 amino acid sequence of any one of the antibodies designated Antibody Number 232 through Antibody Number 372 as disclosed in Table 6; d) the CDRL3 amino acid sequence of any one of the antibodies designated Antibody Number 232 through Antibody Number 372 as disclosed in Table 6; e) the CDRL2 amino acid sequence of any one of the antibodies designated Antibody Number 232 through Antibody Number 372 as disclosed in Table 6; f) the CDRL1 amino acid sequence of any one of the antibodies designated Antibody Number 232 through Antibody Number 372 as disclosed in Table 6; or g) any combination of two or more of a), b), c), d), e), and f).

[0029] In certain other embodiments, the isolated antibodies or antigen-binding fragments thereof comprise: a) a heavy chain (HC) amino acid sequence of any one of the antibodies designated Antibody Number 232 through Antibody Number 372 as disclosed in Table 6; and/or b) a light chain (LC) amino acid sequence of any one of the antibodies designated Antibody Number 232 through Antibody Number 372 as disclosed in Table 6.

[0030] In certain other embodiments, the isolated antibodies or antigen-binding fragments thereof are selected from the group consisting of antibodies that are at least 70% identical; at least 75% identical; 80% identical; at least 85% identical; at least 90% identical; at least 95% identical; at least 96% identical; at least 97% identical; at least 98% identical; at least 99%; and/or all percentages of identity in between; to any one of the antibodies designated as Antibody Number 232 through Antibody Number 372 as disclosed in Table 6.

[0031] In certain other embodiments, the isolated antibodies or antigen-binding fragments thereof are selected from the group consisting of the antibodies designated as Antibody Number 232 through Antibody Number 372 as disclosed in Table 6.

[0032] In other embodiments are provided isolated nucleic acid sequences encoding antibodies, light and/or heavy chains thereof, antigen-binding fragments thereof, or light and/or heavy chains encoding such antigen-binding fragments according to any of the other embodiments disclosed herein.

[0033] In other embodiments are provided expression vectors comprising isolated nucleic acid sequences according to other embodiments disclosed herein.

[0034] In other embodiments are provided host cells transfected, transformed, or transduced with nucleic acid sequences or expression vectors according to other embodiments disclosed herein.

[0035] In other embodiments are provided pharmaceutical compositions comprising one or more of the isolated antibodies or antigen-binding fragments thereof according to other embodiments disclosed herein; and a pharmaceutically acceptable carrier and/or excipient.

[0036] In other embodiments are provided pharmaceutical compositions comprising a nucleic acid sequence of the invention, e.g., one or more nucleic acid sequences encoding at least one of a light or heavy chain of an antibody or both according other embodiments disclosed herein; or one or more expression vectors according to other embodiments disclosed herein; and a pharmaceutically acceptable carrier and/or excipient.

[0037] In other embodiments are provided transgenic organisms comprising nucleic acid sequences according to other embodiments disclosed herein; or expression vectors according to other embodiments disclosed herein.

[0038] In other embodiments are provided methods of treating or preventing a Respiratory Syncytial Virus (RSV) infection, or at least one symptom associated with RSV infection, comprising administering to a patient in need there of or suspected of being in need thereof: a) one or more antibodies or antigen-binding fragments thereof according to other embodiments disclosed herein; b) nucleic acid sequences according to other embodiments disclosed herein; an expression vector according to other embodiments disclosed herein; a host cell according to other embodiments disclosed herein; or e) a pharmaceutical composition according to other embodiments disclosed herein; such that the RSV infection is treated or prevented, or the at least on symptom associated with RSV infection is treated, alleviated, or reduced in severity.

[0039] In other embodiments are provided methods of treating or preventing either a Respiratory Syncytial Virus (RSV) infection and/or a human metapneumovirus (HMPV) infection, or at least one symptom associated with said RSV infection or said HMPV infection, comprising administering to a patient in need thereof or suspected of being in need thereof: a) one or more antibodies or antigen-binding fragments thereof according to other embodiments disclosed herein; b) a nucleic acid sequences according to other embodiments disclosed herein; c) an expression vector according to other embodiments disclosed herein; d)a host cell according to other embodiments disclosed herein; or e) a pharmaceutical composition according to other embodiments disclosed herein; such that the RSV infection is treated or prevented, or the at least on symptom associated with RSV infection is treated, alleviated, or reduced in severity. In other embodiments are provided methods according to other embodiments wherein the one or more antibodies or antigen-binding fragments thereof of a) is selected from the group consisting of the antibodies designated as Antibody Number 340 as disclosed in Table 6.

[0040] In other embodiments are provided methods according to other embodiments wherein the method further comprises administering to the patient a second therapeutic agent.

[0041] In other embodiments are provided methods according to other embodiments, wherein the second therapeutic agent is selected group consisting of: an antiviral agent; a vaccine specific for RSV, a vaccine specific for influenza virus, or a vaccine specific for metapneumovirus (MPV); an siRNA specific for an RSV antigen or a metapneumovirus (MPV) antigen; a second antibody specific for an RSV antigen or a metapneumovirus (MPV) antigen; an anti-IL4R antibody, an antibody specific for an influenza virus antigen, an anti-RSV-G antibody and a NSAID.

[0042] In certain embodiments are provided pharmaceutical compositions comprising any one or more of the isolated antibodies or antigen-binding fragments thereof, or one or more nucleic acid sequences encoding at least one of a light chain or heavy chain of an antibody according to other embodiments disclosed herein or an antigen binding fragment thereof, and a pharmaceutically acceptable carrier and/or excipient.

[0043] In certain embodiments are provided pharmaceutical compositions according to other embodiments for use in preventing a respiratory syncytial virus (RSV) infection in a patient in need thereof or suspected of being in need thereof, or for treating a patient suffering from an RSV infection, or for ameliorating at least one symptom or complication associated with the infection, wherein the infection is either prevented, or at least one symptom or complication associated with the infection is prevented, ameliorated, or lessened in severity and/or duration as a result of such use.

[0044] In certain embodiments are provided pharmaceutical compositions according to other embodiments for use in treating or preventing either a Respiratory Syncytial Virus (RSV) infection and/or a human metapneumovirus (HMPV) infection, or at least one symptom associated with said RSV infection and/or said HMPV infection, in a patient in need thereof or suspected of being in need thereof, wherein the infection is either prevented, or at least one symptom or complication associated with the infection is prevented, ameliorated, or lessened in severity and/or duration as a result of such use.

[0045] In certain other embodiments are provided uses of the pharmaceutical compositions according to other embodiments in the manufacture of a medicament for preventing a respiratory syncytial virus (RSV) infection in a patient in need thereof, or for treating a patient suffering from an RSV infection, or for ameliorating at least one symptom or complication associated with the infection, wherein the infection is either prevented, or at least one symptom or complication associated with the infection is prevented, ameliorated, or lessened in severity and/or duration.

[0046] In certain other embodiments are provided uses of the pharmaceutical compositions according to other embodiments in the manufacture of a medicament for preventing either a Respiratory Syncytial Virus (RSV) infection and/or a human metapneumovirus (HMPV) infection, or at least one symptom associated with said RSV infection and/or said HMPV infection, in a patient in need thereof or suspected of being in need thereof, wherein the infection is either prevented, or at least one symptom or complication associated with the infection is prevented, ameliorated, or lessened in severity and/or duration as a result of such use.

### BRIEF DESCRIPTION OF THE FIGURES

[0047] FIGS. 1A-1F illustrate the anti-RSV repertoire cloning and sequence analysis of the identified and isolated antibodies. FIG. 1A: RSV F-specific B cell sorting. FACS plots show RSV F reactivity of IgG⁺ and IgA⁺ B cells from the healthy adult donor. B cells in quadrant 2 (Q2) were single cell sorted. FIG. 1B: Isotype analysis. Index sort plots show the percentage of RSV F-specific B cells that express IgG or IgA. FIG. 1C: Clonal lineage analysis. Each slice represents one clonal lineage; the size of the slice is proportional to the number of clones in the lineage. The total number of clones is shown in the center of the pie. Clonal lineages were assigned based on the following criteria: 1) matching of variable and joining gene segments; 2) identical CDR3 loop lengths; and 3) >80% homology in CDR3 nucleotide sequences. FIG. 1D: VH repertoire analysis. VH germline genes were considered to be enriched in the RSV repertoire if a given gene was found to be enriched by greater than 3-fold over non-RSV-specific repertoires (33). FIG. 1E: CDRH3 length distribution. FIG. 1F: Somatic hypermutation in VH (excluding CDRH3). Red bars indicate the average number of nucleotide substitutions. Each clonal lineage is only represented once in FIG. 1D and FIG. 1E. Data for non-RSV reactive IgGs were derived from published sequences obtained by high-throughput sequencing of re-arranged antibody variable gene repertoires from healthy individuals (33).

[0048] FIGS. 2A-2D illustrate the similar antibody preferences observed for conformational state and subtype of RSV F in the repertoire. FIG. 2A: IgG affinities for preF and postF are plotted as shown. FIG. 2B: Percentage of antibodies within the donor repertoire that recognized both conformations of F (green) or bind only to preF (blue) or postF (orange). FIG. 2C: Percentage of antibodies within the donor repertoire that bind specifically to subtype A (green), subtype B (blue), or both subtypes A and B (red). N.B., non-binder. IgG KDs were calculated for antibodies with BLI responses >0.1 nm. Antibodies with BLI responses <0.05 nm were designated as N.B. FIG. 2D: Polyreactivity analysis of anti-RSV antibodies. The polyreactivity of the isolated anti-RSV F antibodies was measured using a previously described assay (42, 43). Three panels of control antibodies were included for comparison: a group of 138 antibodies currently in clinical trials, 39 antibodies that have been approved for clinical use and 14 broadly neutralizing HIV antibodies.

[0049] FIGS. 3A-3G illustrate mapping and specificities of anti-RSV antibodies for antigenic sites spanning the surface of PreF and PostF. FIG. 3A: The previously determined structure of preF with one protomer shown as ribbons and with six antigenic sites rainbow colored from red to purple. FIG. 3B: The percentage of antibodies targeting each antigenic site is shown. FIG. 3C: Percentage of preF-specific antibodies targeting each antigenic site. FIG. 3D: Apparent antibody binding affinities for subtype A PreF antigenic sites. FIG. 3E: Apparent binding affinities for subtype A postF antigenic sites. FIG. 3F: Apparent antibody binding affinities for subtype B PreF antigenic sites. FIG. 3G. Apparent binding affinities for subtype B postF. Only antibodies with apparent binding affinities greater than 2 nM were included in this analysis, since antibodies with lower affinity could not be reliably mapped. Red bars show the median and the dotted grey line is at 2 nM. N.B., non-binder.

[0050] FIGS. 4A-4G illustrate neutralizing potencies of anti-RSV antibodies and correlation between potency and Pref vs. PostF specificity for each of RSV subtypes A and B. FIG. 4A: Neutralization IC₅₀s for the antibodies isolated from the donor repertoire. Data points are colored based on neutralization potency, according to the legend on the right. Red and blue dotted lines depict motavizumab and D25 IC₅₀s, respectively. FIG. 4B: Percentage of neutralizing antibodies in the donor repertoire against RSV subtype A or subtype B, stratified by potency as indicated in the legend in the right portion of the figure. FIG. 4C: Percentage of antibodies within the donor repertoire that neutralized both RSV subtypes A and B (red) or neutralized only RSV subtype A (green) or subtype B (blue). FIG. 4D: Apparent binding affinities for subtype A, preF and postF, plotted for each antibody (IgG KDs were calculated for antibodies with BLI responses >0.1 nm. Antibodies with BLI responses <0.05 nm were designated as N.B.) FIG. 4E: Neutralization IC₅₀s plotted for RSV subtype A preF-specific, postF-specific, and cross-reactive antibodies. (Red and blue dotted lines depict motavizumab and D25 IC₅₀s, respectively. Red bars depict median. N.B., non-binder; N.N., non-neutralizing). FIG. 4F: Apparent antibody binding affinities for subtype B, preF and postF. FIG. 4G: IC₅₀s plotted for RSV subtype B preF-specific, postF-specific and cross-reactive antibodies. (Black bar depicts median. N.B., non-binder; N.N., non-neutralizing.)

[0051] FIGS. 5A-5C illustrate that the most potent neutralizing antibodies bind with high affinity to preF and recognize antigenic sites Ø and V. FIG. 5A: apparent preF K_{D} plotted against neutralization IC₅₀ and colored according to antigenic site, as shown in the legend at right of FIG. 5C. FIG. 5B: apparent postF K_{D} plotted against neutralization IC₅₀ and colored as in FIG. 5A. FIG. 5C: antibodies grouped according to neutralization potency and colored by antigenic site as in legend at right. N.B., non-binder; N.N., non-neutralizing. IgG K_{D}s were calculated for antibodies with BLI responses >0.1 nm. Antibodies with BLI responses <0.05 nm were designated as N.B. Statistical significance was determined using an unpaired two-tailed t test. The Pearson's correlation coefficient, r, was calculated using Prism software version 7.0. Antibodies that failed to bind or neutralize were excluded from the statistical analysis due to the inability to accurately calculate midpoint concentrations.

[0052] FIGS. 6A-6C illustrate the nature and purification of pre- and postF sorting probes. FIG. 6A: Schematic of fluorescent prefusion RSV F probe shows one PE-conjugated streptavidin molecule bound by four avi-tagged trimeric prefusion F molecules. FIG. 6B: Coomassie-stained SDS-PAGE gel demonstrating the isolation of RSV F with a single AviTag per trimer using sequential Ni-NTA and Strep-Tactin purifications, as described in the Methods. FIG. 6C: Fluorescence size-exclusion chromatography (FSEC) trace of the tetrameric probes on a Superose 6 column. Positions of molecular weight standards are indicated with arrows.

[0053] FIGS. 7A-7C illustrate the generation and validation of preF patch panel mutants. FIG. 7A: Panel of RSV F variants used for epitope mapping. FIG. 7B: Prefusion RSV F shown as molecular surface with one protomer colored in white. The nine variants, each containing a patch of mutations, are uniquely colored according to the table in FIG. 7A. FIG. 7C: Binding of each IgG to fluorescently labeled beads coupled to each of the variants listed in FIG. 7A was measured using PE-conjugated anti-human Fc antibody on a FLEXMAP 3D flow cytometer (Luminex). Reduced binding of D25 and motavizumab to patches 1 and 5, respectively, is consistent with their structurally defined epitopes (10, 11). AM14 binding was reduced for both patch 3 and patch 9, due to its unique protomer-spanning epitope (21). This characteristic binding profile was used to assist in the classification of other possible quaternary-specific antibodies in the panel.

[0054] FIG. 8 illustrates the antigenic site V resides between the epitopes recognized by D25, MPE8 and motavizumab. Prefusion F is shown with one promoter as a cartoon colored according to antigenic site location and the other two protomers colored grey. D25 and motavizumab Fabs are shown in blue and pink, respectively. The MPE8 binding site is circled in black. Antigenic site V is located between the binding sites of D25 and MPE8 within one protomer, explaining the competition between site-V directed antibodies and these controls. Competition with motavizumab may occur across two adjacent protomers (left) or within one protomer (right), depending on the angle-of-approach of these site-V directed antibodies.

[0055] FIG. 9 illustrates percentage of anti-RSV antibodies demonstrating the indicated neutralizing activities of preF-specific, postF-specific, and cross-reactive antibodies. Antibodies were stratified according to neutralization potency and the percentage of antibodies in each group that were preF-specific (pink), postF-specific (white) or cross-reactive (orange) were plotted for subtype A (left panel) and subtype B (right panel).

[0056] FIGS. 10A-10C illustrate the relationship between subtype B neutralization and antigenic site specificity for anti-RSV antibodies. FIG. 10A: Subtype B preF affinity plotted against neutralization IC₅₀ for all antibodies and colored by antigenic site according to the color scheme depicted in FIG. 10C, right portion. FIG. 10B: PostF affinity plotted against IC₅₀ and colored as in FIG. 10A. FIG. 10C: Antibodies with preF affinities higher than 2 nM grouped according to neutralization potency and colored by antigenic site (right portion).

[0057] FIG. 11 illustrates in vitro neutralization of RSV A2 for specific anti-RSV antibodies. Inhibition of RSV-replication was measured in an ELISA based neutralization Assay using Hep-2 cells. Cells, mAbs and viruses were co-incubated for 4 days at 37° C., followed by quantification of viral proteins in infected cells using a polyclonal anti-RSV antibody. % inhibition was calculated relative to control cells infected with virus in absence of neutralizing antibody. Data are expressed as half-maximal inhibitory concentration that resulted in 50% reduction in virus replication (IC50) and represent the mean +/−SEM of two independent experiments. An isotype matched control mAb (*) was included in every experiment and did not exhibit virus neutralization.

### DETAILED DESCRIPTION OF THE INVENTION

[0058] Unless defined otherwise, all technical and scientific terms used herein have the same meaning as commonly understood by one of ordinary skill in the art to which this invention belongs. As used herein, the term “about,” when used in reference to a particular recited numerical value, means that the value may vary from the recited value by no more than 1%. For example, as used herein, the expression “about 100” includes 99 and 101 and all values in between (e.g., 99.1, 99.2, 99.3, 99.4, etc.).

### Definitions

[0059] “Respiratory Syncytial Virus-F protein”, also referred to as “RSV-F” or “RSV F” is a type I transmembrane surface protein, which has an N terminal cleaved signal peptide and a membrane anchor near the C terminus (Collins, P. L. et al., (1984), PNAS (USA) 81 :7683-7687). The RSV-F protein is synthesized as an inactive 67 KDa precursor denoted as F0 (Calder, L. J.; et al., Virology (2000), 277,122-131. The F0 protein is activated proteolytically in the Golgi complex by a furin-like protease at two sites, yielding two disulfide linked polypeptides, F2 and F1, from the N and C terminal, respectively. There is a 27 amino acid peptide released called “pep27”. There are furin cleavage sites (FCS) on either side of the pep27 (Collins, P. L.; Mottet, G. (1991), J. Gen. Virol., 72: 3095-3101 ; Sugrue, R. J, et al. (2001), J. Gen. Virol., 82, 1375-1386). The F2 subunit consists of the Heptad repeat C (HRC), while the F1 contains the fusion polypeptide (FP), heptad repeat A (HRA), domain I, domain II, heptad repeat B (HRB), transmembrane (TM) and cytoplasmic domain (CP) (See Sun, Z. et al. Viruses (2013), 5:21 1-225). The RSV-F protein plays a role in fusion of the virus particle to the cell membrane, and is expressed on the surface of infected cells, thus playing a role in cell to cell transmission of the virus and syncytia formation. The amino acid sequence of the RSV-F protein is provided in GenBank as accession number AAX23994.

[0060] A stabilized variant of the PreF trimeric conformation of RSV-F, termed “RSV-DS-Cav1”, or “DS-Cav1” disclosed in, inter alia, Stewart-Jones et al., PLos One, Vol. 10(6)):e0128779 and WO 2011/050168 was used in the identification, isolation, and characterization of the antibodies disclosed herein.

[0061] The term “laboratory strain” as used herein refers to a strain of RSV (subtype A or B) that has been passaged extensively in in vitro cell culture. A “laboratory strain” can acquire adaptive mutations that may affect their biological properties. A “clinical strain” as used herein refers to an RSV isolate (subtype A or B), which is obtained from an infected individual and which has been isolated and grown in tissue culture at low passage.

[0062] The term “effective dose 99” or “ED₉₉” refers to the dosage of an agent that produces a desired effect of 99% reduction of viral forming plaques relative to the isotype (negative) control. In the present invention, the ED₉₉ refers to the dosage of the anti-RSV-F antibodies that will neutralize the virus infection (e.g., reduce 99% of viral load) in vivo, as described in Example 5.

[0063] The term “IC₅₀” refers to the “half maximal inhibitory concentration”, which value measures the effectiveness of compound (e.g., anti-RSV-F antibody) inhibition towards a biological or biochemical utility. This quantitative measure indicates the quantity required for a particular inhibitor to inhibit a given biological process by half In certain embodiments, RSV virus neutralization potencies for anti-RSV and/or anti-RSV/anti-HMPV cross-neutralizing antibodies disclosed herein are expressed as neutralization IC₅₀ values.

[0064] “Palivizumab”, also referred to as “SYNAGIS®”, is a humanized anti-RSV-F antibody with heavy and light chain variable domains having the amino acid sequences as set forth in U.S. Pat. Nos. 7,635,568 and 5,824,307. This antibody, which immunospecifically binds to the RSV-F protein, is currently FDA-approved for the passive immunoprophylaxis of serious RSV disease in high-risk children and is administered intramuscularly at recommended monthly doses of 15 mg/kg of body weight throughout the RSV season (November through April in the northern hemisphere). SYNAGIS® is composed of 95% human and 5% murine antibody sequences. See also Johnson et al., (1997), J. Infect. Diseases 176:1215-1224.

[0065] “Motavizumab”, also referred to as “NUMAX™”, is an enhanced potency RSV-F-specific humanized monoclonal antibody derived by in vitro affinity maturation of the complementarity—determining regions of the heavy and light chains of palivizumab. For reference purposes, the amino acid sequence of the NUMAX™ antibody is disclosed in U.S Patent Publication 2003/0091584 and in U.S. Pat. No. 6,818,216 and in Wu et al., (2005) J. Mol. Bio. 350(1):126-144 and in Wu, et al. (2007) J. Mol. Biol. 368:652-665. It is also shown herein as SEQ ID NO: 359 for the heavy chain and as SEQ ID NO: 360 for the light chain of the antibody.

[0066] As used herein, the terms “treat,” “treatment” and “treating” refer to the reduction or amelioration of the progression, severity, and/or duration of an upper and/or lower respiratory tract RSV infection and/or human metapneumovirus (HMPV), otitis media, or a symptom or respiratory condition related thereto (such as asthma, wheezing, or a combination thereof) resulting from the administration of one or more therapies (including, but not limited to, the administration of one or more prophylactic or therapeutic agents). In certain embodiments, such terms refer to the reduction or inhibition of the replication of RSV and/or HMPV, the inhibition or reduction in the spread of RSV and/or HMPV to other tissues or subjects (e.g., the spread to the lower respiratory tract), the inhibition or reduction of infection of a cell with a RSV and/or HMPV, or the amelioration of one or more symptoms associated with an upper and/or lower respiratory tract RSV infection or otitis media.

[0067] As used herein, the terms “prevent,” “preventing,” and “prevention” refer to the prevention or inhibition of the development or onset of an upper and/or lower respiratory tract RSV and/or HMPV infection, otitis media or a respiratory condition related thereto in a subject, the prevention or inhibition of the progression of an upper respiratory tract RSV and/or HMPV infection to a lower respiratory tract RSV and/or HMPV infection, otitis media or a respiratory condition related thereto resulting from the administration of a therapy (e.g., a prophylactic or therapeutic agent), the prevention of a symptom of an upper and/or lower tract RSV and/or HMPV infection, otitis media or a respiratory condition related thereto, or the administration of a combination of therapies (e.g., a combination of prophylactic or therapeutic agents). As used herein, the terms “ameliorate” and “alleviate” refer to a reduction or diminishment in the severity a condition or any symptoms thereof.

[0068] The term “antibody”, as used herein, is intended to refer to immunoglobulin molecules comprised of four polypeptide chains, two heavy (H) chains and two light (L) chains interconnected by disulfide bonds (i.e., “full antibody molecules”), as well as multimers thereof (e.g. IgM) or antigen-binding fragments thereof. Each heavy chain (HC) is comprised of a heavy chain variable region (“HCVR” or “V_{H}”) and a heavy chain constant region (comprised of domains C_{H}1, C_{H}2 and C_{H}3). Each light chain (LC) is comprised of a light chain variable region (“LCVR or “V_{L}”) and a light chain constant region (C_{L}). The V_{H} and V_{L} regions can be further subdivided into regions of hypervariability, termed complementarity determining regions (CDRs), interspersed with regions that are more conserved, termed framework regions (FRs). Each V_{H} and V_{L} is composed of three CDRs and four FRs, arranged from amino-terminus to carboxy-terminus in the following order: FR, CDR1, FR2, CDR2, FR3, CDR3, FR4. In certain embodiments of the invention, the FRs of the antibody (or antigen binding fragment thereof) may be identical to the human germline sequences, or may be naturally or artificially modified. An amino acid consensus sequence may be defined based on a side-by-side analysis of two or more CDRs. Accordingly, the CDRs in a heavy chain are designated “CHRH1”, “CDRH2”, and “CDRH3”, respectively, and the CDRs in a light chain are designated “CDRL1”, “CDRL2”, and “CDRL3”.

[0069] Substitution of one or more CDR residues or omission of one or more CDRs is also possible. Antibodies have been described in the scientific literature in which one or two CDRs can be dispensed with for binding. Padlan et al. (1995 FASEB J. 9:133-139) analyzed the contact regions between antibodies and their antigens, based on published crystal structures, and concluded that only about one fifth to one third of CDR residues actually contact the antigen. Padlan also found many antibodies in which one or two CDRs had no amino acids in contact with an antigen (see also, Vajdos et al. 2002 J Mol Biol 320:415-428).

[0070] CDR residues not contacting antigen can be identified based on previous studies (for example residues H60-H65 in CDRH2 are often not required), from regions of Kabat CDRs lying outside Chothia CDRs, by molecular modeling and/or empirically. If a CDR or residue(s) thereof is omitted, it is usually substituted with an amino acid occupying the corresponding position in another human antibody sequence or a consensus of such sequences. Positions for substitution within CDRs and amino acids to substitute can also be selected empirically.

[0071] The fully human monoclonal antibodies disclosed herein may comprise one or more amino acid substitutions, insertions and/or deletions in the framework and/or CDR regions of the heavy and light chain variable domains as compared to the corresponding germline sequences. Such mutations can be readily ascertained by comparing the amino acid sequences disclosed herein to germline sequences available from, for example, public antibody sequence databases. The present invention includes antibodies, and antigen-binding fragments thereof, which are derived from any of the amino acid sequences disclosed herein, wherein one or more amino acids within one or more framework and/or CDR regions are mutated to the corresponding residue(s) of the germline sequence from which the antibody was derived, or to the corresponding residue(s) of another human germline sequence, or to a conservative amino acid substitution of the corresponding germline residue(s) (such sequence changes are referred to herein collectively as “germline mutations”). A person of ordinary skill in the art, starting with the heavy and light chain variable region sequences disclosed herein, can easily produce numerous antibodies and antigen-binding fragments which comprise one or more individual germline mutations or combinations thereof. In certain embodiments, all of the framework and/or CDR residues within the V_{H} and/or V_{L} domains are mutated back to the residues found in the original germline sequence from which the antibody was derived. In other embodiments, only certain residues are mutated back to the original germline sequence, e.g., only the mutated residues found within the first 8 amino acids of FR1 or within the last 8 amino acids of FR4, or only the mutated residues found within CDR1, CDR2 or CDR3. In other embodiments, one or more of the framework and/or CDR residue(s) are mutated to the corresponding residue(s) of a different germline sequence (i.e., a germline sequence that is different from the germline sequence from which the antibody was originally derived). Furthermore, the antibodies of the present invention may contain any combination of two or more germline mutations within the framework and/or CDR regions, e.g., wherein certain individual residues are mutated to the corresponding residue of a particular germline sequence while certain other residues that differ from the original germline sequence are maintained or are mutated to the corresponding residue of a different germline sequence. Once obtained, antibodies and antigen-binding fragments that contain one or more germline mutations can be easily tested for one or more desired property such as, improved binding specificity, increased binding affinity, improved or enhanced antagonistic or agonistic biological properties (as the case may be), reduced immunogenicity, etc. Antibodies and antigen-binding fragments obtained in this general manner are encompassed within the present invention.

[0072] The present invention also includes fully monoclonal antibodies comprising variants of any of the CDR amino acid sequences disclosed herein having one or more conservative substitutions. For example, the present invention includes antibodies having CDR amino acid sequences with, e.g., 10 or fewer, 8 or fewer, 6 or fewer, 4 or fewer, etc. conservative amino acid substitutions relative to any of the CDR amino acid sequences disclosed herein.

[0073] The term “human antibody”, as used herein, is intended to include antibodies having variable and constant regions derived from human germline immunoglobulin sequences. The human mAbs of the invention may include amino acid residues not encoded by human germline immunoglobulin sequences (e.g., mutations introduced by random or site-specific mutagenesis in vitro or by somatic mutation in vivo), for example in the CDRs and in particular CDR3.

[0074] However, the term “human antibody”, as used herein, is not intended to include mAbs in which CDR sequences derived from the germline of another mammalian species (e.g., mouse), have been grafted onto human FR sequences.

[0075] The term “humanized antibody” refers to human antibody in which one or more CDRs of such antibody have been replaced with one or more corresponding CDRs obtained a non-human derived (e.g., mouse, rat, rabbit, primate) antibody. Humanized antibodies may also include certain non-CDR sequences or residues derived from such non-human antibodies as well as the one or more non-human CDR sequence. Such antibodies may also be referred to as “chimeric antibodies”.

[0076] The term “recombinant” generally refers to any protein, polypeptide, or cell expressing a gene of interest that is produced by genetic engineering methods. The term “recombinant” as used with respect to a protein or polypeptide, means a polypeptide produced by expression of a recombinant polynucleotide. The proteins used in the immunogenic compositions of the invention may be isolated from a natural source or produced by genetic engineering methods.

[0077] The antibodies of the invention may, in some embodiments, be recombinant human antibodies. The term “recombinant human antibody”, as used herein, is intended to include all antibodies, including human or humanized antibodies, that are prepared, expressed, created or isolated by recombinant means, such as antibodies expressed using a recombinant expression vector transfected into a host cell (described further below), antibodies isolated from a recombinant, combinatorial human antibody library (described further below), antibodies isolated from an animal (e.g., a mouse) that is transgenic for human immunoglobulin genes (see e.g., Taylor et al. (1992) Nucl. Acids Res. 20:6287-6295) or antibodies prepared, expressed, created or isolated by any other means that involves splicing of human immunoglobulin gene sequences to other DNA sequences. Such recombinant human antibodies have variable and constant regions derived from human germline immunoglobulin sequences. In certain embodiments, however, such recombinant human antibodies are subjected to in vitro mutagenesis (or, when an animal transgenic for human Ig sequences is used, in vivo somatic mutagenesis) and thus the amino acid sequences of the V_{H} and V_{L} regions of the recombinant antibodies are sequences that, while derived from and related to human germline V_{H} and V_{L} sequences, may not naturally exist within the human antibody germline repertoire in vivo.

[0078] The term “specifically binds,” or “binds specifically to”, or the like, means that an antibody or antigen-binding fragment thereof forms a complex with an antigen that is relatively stable under physiologic conditions. Specific binding can be characterized by an equilibrium dissociation constant of at least about 1×10⁻⁶ M or less (e.g., a smaller K_{D} denotes a tighter binding). Methods for determining whether two molecules specifically bind are well known in the art and include, for example, equilibrium dialysis, surface plasmon resonance, and the like. As described herein, antibodies have been identified by surface plasmon resonance, e.g., BIACORE™, biolayer interferometry measurements using, e.g., a ForteBio Octet HTX instrument (Pall Life Sciences), which bind specifically to RSV-F. Moreover, multi-specific antibodies that bind to RSV-F protein and one or more additional antigens, such as an antigen expressed by HMPV, or a bi-specific that binds to two different regions of RSV-F are nonetheless considered antibodies that “specifically bind”, as used herein. In certain embodiments, the antibodies disclosed herein display equilibrium dissociation constants (and hence specificities) of about 1×10−⁶ M; about 1×10−⁷ M; about 1×10−⁸ M; about 1×10−⁹ M; about 1×10⁻¹⁰ M; between about 1×10⁻⁶ M and about 1×10−⁷ M; between about 1×10−⁷M and about 1×10−⁸ M; between about 1×10−⁸ M and about 1×10−⁹ M; or between about 1×10−⁹ M and about 1×10−¹⁰ M.

[0079] The term “high affinity” antibody refers to those mAbs having a binding affinity to RSV-F and/or HMPV, expressed as K_{D}, of at least 10−⁹ M; more preferably 10−¹⁰M, more preferably 10⁻¹¹M, more preferably 10⁻¹²M as measured by surface plasmon resonance, e.g., BIACORE™, biolayer interferometry measurements using, e.g., a ForteBio Octet HTX instrument (Pall Life Sciences), or solution-affinity ELISA.

[0080] By the term “slow off rate”, “Koff” or “kd” is meant an antibody that dissociates from RSV-F, with a rate constant of 1×10⁻³ s^{″1} or less, preferably 1×10⁻⁴ s^{″1} or less, as determined by surface plasmon resonance, e.g., BIACORE™ or a ForteBio Octet HTX instrument (Pall Life Sciences).

[0081] The terms “antigen-binding portion” of an antibody, “antigen-binding fragment” of an antibody, and the like, as used herein, include any naturally occurring, enzymatically obtainable, synthetic, or genetically engineered polypeptide or glycoprotein that specifically binds an antigen to form a complex. In certain embodiments, the terms “antigen-binding portion” of an antibody, or “antibody fragment”, as used herein, refers to one or more fragments of an antibody that retains the ability to bind to RSV-F and/or HMPV.

[0082] An antibody fragment may include a Fab fragment, a F(ab′)₂fragment, a Fv fragment, a dAb fragment, a fragment containing a CDR, or an isolated CDR. Antigen-binding fragments of an antibody may be derived, e.g., from full antibody molecules using any suitable standard techniques such as proteolytic digestion or recombinant genetic engineering techniques involving the manipulation and expression of DNA encoding antibody variable and (optionally) constant domains. Such DNA is known and/or is readily available from, e.g., commercial sources, DNA libraries (including, e.g., phage-antibody libraries), or can be synthesized. The DNA may be sequenced and manipulated chemically or by using molecular biology techniques, for example, to arrange one or more variable and/or constant domains into a suitable configuration, or to introduce codons, create cysteine residues, modify, add or delete amino acids, etc.

[0083] Non-limiting examples of antigen-binding fragments include: (i) Fab fragments; (ii) F(ab′)2 fragments; (iii) Fd fragments; (iv) Fv fragments; (v) single-chain Fv (scFv) molecules; (vi) dAb fragments; and (vii) minimal recognition units consisting of the amino acid residues that mimic the hypervariable region of an antibody (e.g., an isolated complementarity determining region (CDR) such as a CDR3 peptide), or a constrained FR3-CDR3-FR4 peptide. Other engineered molecules, such as domain-specific antibodies, single domain antibodies, domain-deleted antibodies, chimeric antibodies, CDR-grafted antibodies, diabodies, triabodies, tetrabodies, minibodies, nanobodies (e.g. monovalent nanobodies, bivalent nanobodies, etc.), small modular immunopharmaceuticals (SMIPs), and shark variable IgNAR domains, are also encompassed within the expression “antigen-binding fragment,” as used herein.

[0084] An antigen-binding fragment of an antibody will typically comprise at least one variable domain. The variable domain may be of any size or amino acid composition and will generally comprise at least one CDR, which is adjacent to or in frame with one or more framework sequences. In antigen-binding fragments having a V_{H} domain associated with a V_{L} domain, the V_{H} and V_{L} domains may be situated relative to one another in any suitable arrangement. For example, the variable region may be dimeric and contain V_{H}-V_{H}, V_{H}-V_{L} or V_{L}-V_{L} dimers. Alternatively, the antigen-binding fragment of an antibody may contain a monomeric V_{H} or V_{L} domain.

[0085] In certain embodiments, an antigen-binding fragment of an antibody may contain at least one variable domain covalently linked to at least one constant domain. Non-limiting, exemplary configurations of variable and constant domains that may be found within an antigen-binding fragment of an antibody of the present invention include: (i) V_{H}-C_{H}1 ; (ii) V_{H}-C_{H}2; (iii) V_{H}-C_{H}3; (iv) V_{H}-Cₕ1-Cₕ2; (v) V_{H}-Cₕ1-Cₕ2-Cₕ3; (vi) V_{H}-C_{H}2-C_{H}3; (vii) V_{H}-C_{L}; V_{L}-C_{H}1 ; (ix) V_{L}-C_{H}2; (x) V_{L}-C_{H}3; (xi) V_{L}-C_{H}1-C_{H}2; (xii) V_{L}-C_{H}1-C_{H}2-C_{H}3; (xiii) V_{L}-C_{H}2-C_{H}3; and (xiv) V_{L}-C_{L}. In any configuration of variable and constant domains, including any of the exemplary configurations listed above, the variable and constant domains may be either directly linked to one another or may be linked by a full or partial hinge or linker region. A hinge region may consist of at least 2 (e.g., 5, 10, 15, 20, 40, 60 or more) amino acids, which result in a flexible or semi-flexible linkage between adjacent variable and/or constant domains in a single polypeptide molecule. Moreover, an antigen-binding fragment of an antibody of the present invention may comprise a homo-dimer or hetero-dimer (or other multimer) of any of the variable and constant domain configurations listed above in non-covalent association with one another and/or with one or more monomeric V_{H} or V_{L} domain (e.g., by disulfide bond(s)).

[0086] As with full antibody molecules, antigen-binding fragments may be mono-specific or multi-specific (e.g., bi-specific). A multi-specific antigen-binding fragment of an antibody will typically comprise at least two different variable domains, wherein each variable domain is capable of specifically binding to a separate antigen or to a different epitope on the same antigen. Any multi-specific antibody format, including the exemplary bi-specific antibody formats disclosed herein, may be adapted for use in the context of an antigen-binding fragment of an antibody of the present invention using routine techniques available in the art.

[0087] The specific embodiments, antibody or antibody fragments of the invention may be conjugated to a therapeutic moiety (“immunoconjugate”), such as an antibiotic, a second anti-RSV-F antibody, an anti-HMPV antibody, a vaccine, or a toxoid, or any other therapeutic moiety useful for treating an RSV infection and/or an HMPV infection.

[0088] An “isolated antibody”, as used herein, is intended to refer to an antibody that is substantially free of other antibodies (Abs) having different antigenic specificities (e.g., an isolated antibody that specifically binds RSV-F and/or HMPV, or a fragment thereof, is substantially free of Abs that specifically bind antigens other than RSV-F and/or HMPV.

[0089] A “blocking antibody” or a “neutralizing antibody”, as used herein (or an “antibody that neutralizes RSV-F and/or HMPV activity”), is intended to refer to an antibody whose binding to RSV-F or to an HMPV antigen, as the case may be as disclosed herein, results in inhibition of at least one biological activity of RSV-F and/or HMPV. For example, an antibody of the invention may aid in blocking the fusion of RSV and/or HMPV to a host cell, or prevent syncytia formation, or prevent the primary disease caused by RSV and/or HMPV. Alternatively, an antibody of the invention may demonstrate the ability to ameliorate at least one symptom of the RSV infection and or HMPV infection. This inhibition of the biological activity of RSV-F and/or HMPV can be assessed by measuring one or more indicators of RSV-F and/or HMPV biological activity by one or more of several standard in vitro assays (such as a neutralization assay, as described herein) or in vivo assays known in the art (for example, animal models to look at protection from challenge with RSV and/or HMPV following administration of one or more of the antibodies described herein).

[0090] The term “surface plasmon resonance”, as used herein, refers to an optical phenomenon that allows for the analysis of real-time biomolecular interactions by detection of alterations in protein concentrations within a biosensor matrix, for example using the BIACORE™ system (Pharmacia Biosensor AB, Uppsala, Sweden and Piscataway, N.J.).

[0091] The term “K_{D}”, as used herein, is intended to refer to the equilibrium dissociation constant of a particular antibody-antigen interaction.

[0092] The term “epitope” refers to an antigenic determinant that interacts with a specific antigen binding site in the variable region of an antibody molecule known as a paratope. A single antigen may have more than one epitope. Thus, different antibodies may bind to different areas on an antigen and may have different biological effects. The term “epitope” also refers to a site on an antigen to which B and/or T cells respond. It also refers to a region of an antigen that is bound by an antibody. Epitopes may be defined as structural or functional. Functional epitopes are generally a subset of the structural epitopes and have those residues that directly contribute to the affinity of the interaction. Epitopes may also be conformational, that is, composed of non-linear amino acids. In certain embodiments, epitopes may include determinants that are chemically active surface groupings of molecules such as amino acids, sugar side chains, phosphoryl groups, or sulfonyl groups, and, in certain embodiments, may have specific three-dimensional structural characteristics, and/or specific charge characteristics.

[0093] The term “substantial identity”, or “substantially identical,” when referring to a nucleic acid or fragment thereof, indicates that, when optimally aligned with appropriate nucleotide insertions or deletions with another nucleic acid (or its complementary strand), there is nucleotide sequence identity in at least about 90%, and more preferably at least about 95%, 96%, 97%, 98% or 99% of the nucleotide bases, as measured by any well-known algorithm of sequence identity, such as FASTA, BLAST or GAP, as discussed below. Accordingly, nucleic acid sequences that display a certain percentage “identity” share that percentage identity, and/or are that percentage “identical” to one another. A nucleic acid molecule having substantial identity to a reference nucleic acid molecule may, in certain instances, encode a polypeptide having the same or substantially similar amino acid sequence as the polypeptide encoded by the reference nucleic acid molecule.

[0094] In certain embodiments, the disclosed antibody nucleic acid sequences are, e.g., at least 70% identical; at least 75% identical; at least 80% identical; at least 85% identical; at least 90% identical; at least 95% identical; at least 96% identical; at least 97% identical; at least 98% identical; at least 99% identical; or 100% identical; and/or all percentages of identity in between; to other sequences and/or share such percentage identities with one another (or with certain subsets of the herein-disclosed antibody sequences).

[0095] As applied to polypeptides, the term “substantial identity” or “substantially identical” means that two peptide sequences, when optimally aligned, such as by the programs GAP or BESTFIT using default gap weights, share at least 90% sequence identity, even more preferably at least 95%, 98% or 99% sequence identity. Accordingly, amino acid sequences that display a certain percentage “identity” share that percentage identity, and/or are that percentage “identical” to one another. Accordingly, amino acid sequences that display a certain percentage “identity” share that percentage identity, and/or are that percentage “identical” to one another.

[0096] In certain embodiments, the disclosed antibody amino acid sequences are, e.g., at least 70% identical; at least 75% identical; 80% identical; at least 85% identical; at least 90% identical; at least 95% identical; at least 96% identical; at least 97% identical; at least 98% identical; at least 99%; and/or all percentages of identity in between; to other sequences and/or share such percentage identities with one another (or with certain subsets of the herein-disclosed antibody sequences).

[0097] Preferably, residue positions, which are not identical, differ by conservative amino acid substitutions. A “conservative amino acid substitution” is one in which an amino acid residue is substituted by another amino acid residue having a side chain (R group) with similar chemical properties (e.g., charge or hydrophobicity). In general, a conservative amino acid substitution will not substantially change the functional properties of a protein. In cases where two or more amino acid sequences differ from each other by conservative substitutions, the percent or degree of similarity may be adjusted upwards to correct for the conservative nature of the substitution. Means for making this adjustment are well known to those of skill in the art. (See, e.g., Pearson (1994) Methods Mol. Biol. 24: 307-331). Examples of groups of amino acids that have side chains with similar chemical properties include 1) aliphatic side chains: glycine, alanine, valine, leucine and isoleucine; 2) aliphatic-hydroxyl side chains: serine and threonine; 3) amide-containing side chains: asparagine and glutamine; 4) aromatic side chains: phenylalanine, tyrosine, and tryptophan; 5) basic side chains: lysine, arginine, and histidine; 6) acidic side chains: aspartate and glutamate, and 7) sulfur-containing side chains: cysteine and methionine. Preferred conservative amino acids substitution groups are: valine-leucine-isoleucine, phenylalanine-tyrosine, lysine-arginine, alanine-valine, glutamate-aspartate, and asparagine-glutamine. Alternatively, a conservative replacement is any change having a positive value in the PAM250 log-likelihood matrix disclosed in Gonnet et al. (1992) Science 256: 1443 45. A “moderately conservative” replacement is any change having a nonnegative value in the PAM250 log-likelihood matrix.

[0098] Sequence similarity for polypeptides is typically measured using sequence analysis software. Protein analysis software matches similar sequences using measures of similarity assigned to various substitutions, deletions and other modifications, including conservative amino acid substitutions. For instance, GCG software contains programs such as GAP and BESTFIT which can be used with default parameters to determine sequence homology or sequence identity between closely related polypeptides, such as homologous polypeptides from different species of organisms or between a wild type protein and a mutein thereof. See, e.g., GCG Version 6.1. Polypeptide sequences also can be compared using FASTA with default or recommended parameters; a program in GCG Version 6.1. FASTA {e.g., FASTA2 and FASTA3) provides alignments and percent sequence identity of the regions of the best overlap between the query and search sequences (Pearson (2000) supra). Another preferred algorithm when comparing a sequence of the invention to a database containing a large number of sequences from different organisms is the computer program BLAST, especially BLASTP or TBLASTN, using default parameters. (See, e.g., Altschul et al. (1990) J. Mol. Biol. 215: 403 410 and (1997) Nucleic Acids Res. 25:3389 402).

[0099] In certain embodiments, the antibody or antibody fragment for use in the method of the invention may be mono-specific, bi-specific, or multi-specific. Multi-specific antibodies may be specific for different epitopes of one target polypeptide or may contain antigen-binding domains specific for epitopes of more than one target polypeptide. An exemplary bi-specific antibody format that can be used in the context of the present invention involves the use of a first immunoglobulin (Ig) C_{H}3 domain and a second Ig C_{H}3 domain, wherein the first and second Ig C_{H}3 domains differ from one another by at least one amino acid, and wherein at least one amino acid difference reduces binding of the bi-specific antibody to Protein A as compared to a bi-specific antibody lacking the amino acid difference. In one embodiment, the first Ig C_{H}3 domain binds Protein A and the second Ig C_{H}3 domain contains a mutation that reduces or abolishes Protein A binding such as an H95R modification (by IMGT exon numbering; H435R by EU numbering). The second C_{H}3 may further comprise an Y96F modification (by IMGT; Y436F by EU). Further modifications that may be found within the second C_{H}3 include: D16E, L18M, N44S, K52N, V57M, and V82I (by IMGT; D356E, L358M, N384S, K392N, V397M, and V422I by EU) in the case of IgG1 mAbs; N44S, K52N, and V82I (IMGT; N384S, K392N, and V422I by EU) in the case of IgG2 mAbs; and Q15R, N44S, K52N, V57M, R69K, E79Q, and V82I (by IMGT; Q355R, N384S, K392N, V397M, R409K, E419Q, and V422I by EU) in the case of IgG4 mAbs. Variations on the bi-specific antibody format described above are contemplated within the scope of the present invention.

[0100] By the phrase “therapeutically effective amount” is meant an amount that produces the desired effect for which it is administered. The exact amount will depend on the purpose of the treatment, and will be ascertainable by one skilled in the art using known techniques (see, for example, Lloyd (1999) The Art, Science and Technology of Pharmaceutical Compounding).

[0101] An “immunogenic composition” relates to a composition containing an antigen/immunogen, e.g., a microorganism, such as a virus or a bacterium, or a component thereof, a protein, a polypeptide, a fragment of a protein or polypeptide, a whole cell inactivated, subunit or attenuated virus, or a polysaccharide, or combination thereof, administered to stimulate the recipient's humoral and/or cellular immune systems to one or more of the antigens/immunogens present in the immunogenic composition. The immunogenic compositions of the present invention can be used to treat a human susceptible to RSV and/or HMPV infection or suspected of having or being susceptible to RSV and/or HMPV infection, by means of administering the immunogenic compositions via a systemic route. These administrations can include injection via the intramuscular (i.m.), intradermal (i.d.), intranasal or inhalation route, or subcutaneous (s.c.) routes; application by a patch or other transdermal delivery device. In one embodiment, the immunogenic composition may be used in the manufacture of a vaccine or in the elicitation of polyclonal or monoclonal antibodies that could be used to passively protect or treat a mammal.

[0102] The terms “vaccine” or “vaccine composition”, which are used interchangeably, refer to a composition comprising at least one immunogenic composition that induces an immune response in an animal.

[0103] In certain embodiments, a protein of interest comprises an antigen. The terms “antigen,” “immunogen,” “antigenic,” “immunogenic,” “antigenically active,” and “immunologically active” when made in reference to a molecule, refer to any substance that is capable of inducing a specific humoral and/or cell-mediated immune response. In one embodiment, the antigen comprises an epitope, as defined above.

[0104] “Immunologically protective amount”, as used herein, is an amount of an antigen effective to induce an immunogenic response in the recipient that is adequate to prevent or ameliorate signs or symptoms of disease, including adverse health effects or complications thereof. Either humoral immunity or cell-mediated immunity or both can be induced. The immunogenic response of an animal to a composition can be evaluated, e.g., indirectly through measurement of antibody titers, lymphocyte proliferation assays, or directly through monitoring signs and symptoms after challenge with the microorganism. The protective immunity conferred by an immunogenic composition or vaccine can be evaluated by measuring, e.g., reduction of shed of challenge organisms, reduction in clinical signs such as mortality, morbidity, temperature, and overall physical condition, health and performance of the subject. The immune response can comprise, without limitation, induction of cellular and/or humoral immunity. The amount of a composition or vaccine that is therapeutically effective can vary, depending on the particular organism used, or the condition of the animal being treated or vaccinated.

[0105] An “immune response”, or “immunological response” as used herein, in a subject refers to the development of a humoral immune response, a cellular-immune response, or a humoral and a cellular immune response to an antigen/immunogen. A “humoral immune response” refers to one that is at least in part mediated by antibodies. A “cellular immune response” is one mediated by T-lymphocytes or other white blood cells or both, and includes the production of cytokines, chemokines and similar molecules produced by activated T-cells, white blood cells, or both. Immune responses can be determined using standard immunoassays and neutralization assays, which are known in the art.

[0106] “Immunogenicity”, as used herein, refers to the capability of a protein or polypeptide to elicit an immune response directed specifically against a bacteria or virus that causes the identified disease.

[0107] Unless specifically indicated otherwise, the term “antibody,” as used herein, shall be understood to encompass antibody molecules comprising two immunoglobulin heavy chains and two immunoglobulin light chains (i.e., “full antibody molecules”) as well as antigen-binding fragments thereof. The terms “antigen-binding portion” of an antibody, “antigen-binding fragment” of an antibody, and the like, as used herein, include any naturally occurring, enzymatically obtainable, synthetic, or genetically engineered polypeptide or glycoprotein that specifically binds an antigen to form a complex.

### Preparation of Human Antibodies

[0108] As disclosed herein, anti-RSV and or anti-RSV/anti-HMPF cross neutralizing antibodies by be obtained through B cell sorting techniques available to the artisan, and, for example, as described in the EXAMPLES below. Methods for generating human antibodies in transgenic mice are also known in the art and may be employed in order to derive antibodies in accordance with the present disclosure. Any such known methods can be used in the context of the present invention to make human antibodies that specifically bind to RSV-F (see, for example, U.S. Pat. No. 6,596,541).

[0109] In certain embodiments, the antibodies of the instant invention possess affinities (K_{D}) ranging from about 1.0×10−⁷M to about 1.0×10⁻¹²M, when measured by binding to antigen either immobilized on solid phase or in solution phase. In certain embodiments, the antibodies of the invention possess affinities (K_{D}) ranging from about 1×10⁻⁷ M to about 6×10⁻¹° M, when measured by binding to antigen either immobilized on solid phase or in solution phase. In certain embodiments, the antibodies of the invention possess affinities (K_{D}) ranging from about 1×10⁻⁷ M to about 9×10⁻¹⁰M, when measured by binding to antigen either immobilized on solid phase or in solution phase.

[0110] The anti-RSV-F and/or anti-HMPV antibodies and antibody fragments disclosed herein encompass proteins having amino acid sequences that vary from those of the described antibodies, but that retain the ability to bind RSV-F. Such variant antibodies and antibody fragments comprise one or more additions, deletions, or substitutions of amino acids when compared to parent sequence, but exhibit biological activity that is essentially equivalent to that of the described antibodies. Likewise, the antibody-encoding DNA sequences of the present invention encompass sequences that comprise one or more additions, deletions, or substitutions of nucleotides when compared to the disclosed sequence, but that encode an antibody or antibody fragment that is essentially bioequivalent to an antibody or antibody fragment of the invention.

[0111] Two antigen-binding proteins, or antibodies, are considered bioequivalent if, for example, they are pharmaceutical equivalents or pharmaceutical alternatives whose rate and extent of absorption do not show a significant difference when administered at the same molar dose under similar experimental conditions, either single does or multiple dose. Some antibodies will be considered equivalents or pharmaceutical alternatives if they are equivalent in the extent of their absorption but not in their rate of absorption and yet may be considered bioequivalent because such differences in the rate of absorption are intentional and are reflected in the labeling, are not essential to the attainment of effective body drug concentrations on, e.g., chronic use, and are considered medically insignificant for the particular drug product studied.

[0112] In one embodiment, two antigen-binding proteins are bioequivalent if there are no clinically meaningful differences in their safety, purity, and potency.

[0113] In one embodiment, two antigen-binding proteins are bioequivalent if a patient can be switched one or more times between the reference product and the biological product without an expected increase in the risk of adverse effects, including a clinically significant change in immunogenicity, or diminished effectiveness, as compared to continued therapy without such switching.

[0114] In one embodiment, two antigen-binding proteins are bioequivalent if they both act by a common mechanism or mechanisms of action for the condition or conditions of use, to the extent that such mechanisms are known.

[0115] Bioequivalence may be demonstrated by in vivo and/or in vitro methods. Bioequivalence measures include, e.g., (a) an in vivo test in humans or other mammals, in which the concentration of the antibody or its metabolites is measured in blood, plasma, serum, or other biological fluid as a function of time; (b) an in vitro test that has been correlated with and is reasonably predictive of human in vivo bioavailability data; (c) an in vivo test in humans or other mammals in which the appropriate acute pharmacological effect of the antibody (or its target) is measured as a function of time; and (d) in a well-controlled clinical trial that establishes safety, efficacy, or bioavailability or bioequivalence of an antibody.

[0116] Bioequivalent variants of the antibodies of the invention may be constructed by, for example, making various substitutions of residues or sequences or deleting terminal or internal residues or sequences not needed for biological activity. For example, cysteine residues not essential for biological activity can be deleted or replaced with other amino acids to prevent formation of unnecessary or incorrect intramolecular disulfide bridges upon renaturation. In other contexts, bioequivalent antibodies may include antibody variants comprising amino acid changes, which modify the glycosylation characteristics of the antibodies, e.g., mutations that eliminate or remove glycosylation.

### Biological and Biophysical Characteristics of the Antibodies

[0117] In certain embodiments, the inventive antibodies and antigen-binding fragments thereof specifically bind to Respiratory Syncytial Virus (RSV) F protein (F), wherein at least one of the CDRH1, CDRH2, CDRH3, CDRL1, CDRL2, and/or CDRL3 amino acid sequences of such antibody or the antigen-binding fragment thereof is at least 70% identical; at least 75% identical; 80% identical; at least 85% identical; at least 90% identical; at least 95% identical; at least 96% identical; at least 97% identical; at least 98% identical; at least 99% identical; or 100% identical, and/or all percentages of identity in between; to at least one of the CDRH1, a CDRH2, a CDRH3, a CDRL1, a CDRL2, and/or a CDRL3 amino acid sequences as disclosed in Table 6 of an antibody selected from Antibody Number 232 through Antibody Number 372 as disclosed in Table 6. In certain embodiments, such antibodies also possess at least one, two, three, four, five, six, seven, eight, nine, ten, or more characteristics disclosed in the immediately following eleven paragraphs.

[0118] Without wishing to be bound by any theory, it is believed that the inventive antibodies and antigen-binding fragments thereof may function by binding to RSV-F, preferably in the PreF conformation, and in so doing act to block the fusion of the viral membrane with the host cell membrane. The antibodies of the present invention may also function by binding to RSV-F and in so doing block the cell to cell spread of the virus and block syncytia formation associated with RSV infection of cells. Advantageously, both RSV subtype A and RSV subtype B are effectively blocked, or neutralized, by the majority of the anti-RSV antibodies disclosed herein.

[0119] In certain embodiments, the inventive antibodies and antigen-binding fragment thereof display better binding affinity for the PreF form of RSV-F relative to the PostF form of RSV-F.

[0120] In certain other embodiments, the inventive antibodies and antigen-binding fragments thereof advantageously display a clean or low polyreactivity profile (see, e.g., WO 2014/179363 and Xu et al., Protein Eng Des Sel, October; 26(10):663-70), and are thus particularly amenable to development as safe, efficacious, and developable therapeutic and/or prophylactic anti-RSV and/or HMPV treatments.

[0121] In certain embodiments, the inventive antibodies and antigen-binding fragments thereof, without wishing to be bound by any theory, may function by blocking or inhibiting RSV fusion to the cell membrane by binding to any one or more of, e.g., antigenic Sites Ø, I, II, III, IV, or Site V of the PreF conformation of the F protein. In certain embodiments, the inventive antibodies display antigenic site specificity for Site Ø, Site V, or Site III of PreF relative to RSV-F Site I, Site II, or Site IV.

[0122] In certain embodiments, at least a portion of the epitope with which the inventive antibodies and antigen-binding fragments thereof interacts comprises a portion of the α3 helix and β3/β4 hairpin of PreF. In certain embodiments, substantially all of the epitope of such antibodies comprises the α3 helix and β3/β4 hairpin of PreF. In still further embodiments, the inventive antibodies cross-compete with antibodies that recognize a portion or substantially all of the α3 helix and β3/β4 hairpin of PreF.

[0123] In certain embodiments, the inventive antibodies and antigen-binding fragments thereof display an in vitro neutralization potency (IC₅₀) of between about 0.5 microgram/milliliter (ug/ml) to about 5 ug/ml; between about 0.05 ug/ml to about 0.5 ug/ml; or less than about 0.05 mg/ml.

[0124] In certain embodiments, the binding affinity and/or epitopic specificity of the inventive antibodies and antigen-binding fragments thereof for any one of the RSV-F variants designated as 1, 2, 3, 4, 5, 6, 7, 8, 9, and DG in FIG. 7A is reduced or eliminated relative to the binding affinity and/or epitopic specificity of said antibody or antigen-binding fragment thereof for the RSV-F or RSV-F DS-Cav1.

[0125] In certain embodiments, the inventive antibodies and antigen-binding fragments thereof display a cross-neutralization potency (IC₅₀) against human metapneumovirus (HMPV) as well as RSV. In certain such embodiments, the inventive antibodies and antigen-binding fragments thereof comprise at least one of the CDRH1, CDRH2, CDRH3, CDRL1, CDRL2, and/or CDRL3 amino acid sequences of such antibody or the antigen-binding fragment thereof is at least 70% identical; at least 75% identical; 80% identical; at least 85% identical; at least 90% identical; at least 95% identical; at least 96% identical; at least 97% identical; at least 98% identical; at least 99% identical; or 100% identical; and/or all percentages of identity in between; to at least one of the CDRH1, a CDRH2, a CDRH3, a CDRL1, a CDRL2, and/or a CDRL3 amino acid sequences as disclosed in Table 6 of Antibody Number 340 as disclosed in Table 6.

[0126] In certain embodiments, the inventive antibodies and antigen-binding fragments thereof do not complete with D25, MPE8, palivisumab, motavizumab, or AM-14. In certain embodiments, the inventive antibodies and antigen-binding fragments thereof do not complete with D25, MPE8, palivisumab, or motavizumab. In certain embodiments, the inventive antibodies and antigen-binding fragments thereof do not complete with MPE8, palivisumab, or motavizumab. In certain embodiments, the inventive antibodies and antigen-binding fragments thereof do not complete with D25, palivisumab, or motavizumab. In certain embodiments, the inventive antibodies and antigen-binding fragments thereof do not complete with D25. In certain embodiments, the inventive antibodies and antigen-binding fragments thereof do not complete with MPE8. In certain embodiments, the inventive antibodies and antigen-binding fragments thereof do not complete with palivisumab. In certain embodiments, the inventive antibodies and antigen-binding fragments thereof do not complete with motavizumab.

[0127] In certain embodiments, the inventive antibodies and antigen-binding fragments thereof complete with one or more of D25, MPE8, palivisumab, motavizumab, and/or AM-14.

[0128] In certain embodiments, the inventive antibodies and antigen-binding fragments thereof display at least about 2-fold; at least about 3-fold; at least about 4-fold; at least about 5-fold; at least about 6-fold; at least about 7-fold; at least about 8-fold; at least about 9-fold; at least about 10-fold; at least about 15-fold; at least about 20-fold; at least about 25-fold; at least about 30-fold; at least about 35-fold; at least about 40-fold; at least about 50-fold; at least about 55-fold; at least about 60-fold; at least about 70-fold; at least about 80-fold; at least about 90-fold; at least about 100-fold; greater than about 100-fold; and folds in between any of the foregoing; greater neutralization potency (IC50) than D25 and/or palivizumab.

[0129] In certain embodiments, the inventive antibodies and antigen-binding fragments thereof comprise the CDRH3 amino acid sequence of any one of the antibodies designated Antibody Number 232 through Antibody Number 372 as disclosed in Table 6.

[0130] In certain embodiments, the inventive antibodies and antigen-binding fragments thereof comprise the CDRH2 amino acid sequence of any one of the antibodies designated Antibody Number 232 through Antibody Number 372 as disclosed in Table 6.

[0131] In certain embodiments, the inventive antibodies and antigen-binding fragments thereof comprise the CDRH1 amino acid sequence of any one of the antibodies designated Antibody Number 232 through Antibody Number 372 as disclosed in Table 6.

[0132] In certain embodiments, the inventive antibodies and antigen-binding fragments thereof comprise the CDRL3 amino acid sequence of any one of the antibodies designated Antibody Number 232 through Antibody Number 372 as disclosed in Table 6.

[0133] In certain embodiments, the inventive antibodies and antigen-binding fragments thereof comprise the CDRL2 amino acid sequence of any one of the antibodies designated Antibody Number 232 through Antibody Number 372 as disclosed in Table 6.

[0134] In certain embodiments, the inventive antibodies and antigen-binding fragments thereof comprise the CDRL1 amino acid sequence of any one of the antibodies designated Antibody Number 232 through Antibody Number 372 as disclosed in Table 6.

[0135] In certain embodiments, the inventive antibodies and antigen-binding fragments thereof comprise any combination of two, three, four, five, or six characteristics disclosed in the immediately preceeding six paragraphs.

[0136] In certain embodiments, the inventive antibodies and antigen-binding fragments thereof comprise a heavy chain (HC) amino acid sequence of any one of the antibodies designated Antibody Number 232 through Antibody Number 372 as disclosed in Table 6. In certain embodiments, the inventive antibodies and antigen-binding fragments thereof comprise a light chain (LC) amino acid sequence of any one of the antibodies designated Antibody Number 232 through Antibody Number 372 as disclosed in Table 6. In certain embodiments, the inventive antibodies and antigen-binding fragments thereof comprise a heavy chain (HC) amino acid sequence and a light chain (LC) amino acid sequence of any one of the antibodies designated Antibody Number 232 through Antibody Number 372 as disclosed in Table 6.

[0137] In certain embodiments, the inventive antibodies and antigen-binding fragments thereof are each selected from the group consisting antibodies that are at least 70% identical; at least 75% identical; 80% identical; at least 85% identical; at least 90% identical; at least 95% identical; at least 96% identical; at least 97% identical; at least 98% identical; at least 99% identical; or 100% identical; and/or all percentages of identity in between; to any one of the antibodies designated as Antibody Number 232 through Antibody Number 372 as disclosed in Table 6.

[0138] In certain embodiments, the inventive antibodies and antigen-binding fragments thereof comprise are each selected from the group consisting of the antibodies designated as Antibody Number 232 through Antibody Number 372 as disclosed in Table 6.

[0139] In certain embodiments, isolated nucleic acid sequences are provided that encode antibodies or antigen binding fragments thereof that specifically bind to Respiratory Syncytial Virus (RSV) F protein and antigen-binding fragments thereof, wherein at least one of the CDRH1, CDRH2, CDRH3, CDRL1, CDRL2, and/or CDRL3 amino acid sequences of the antibody or the antigen-binding fragment thereof is at least 70% identical; at least 75% identical; 80% identical; at least 85% identical; at least 90% identical; at least 95% identical; at least 96% identical; at least 97% identical; at least 98% identical; at least 99% identical; or at least 100% identical and/or all percentages of identity in between; to at least one the CDRH1, CDRH2, CDRH3, CDRL1, CDRL2, and/or CDRL3 amino acid sequences as disclosed in Table 6 of an antibody selected from Antibody Number 232 through Antibody Number 372 as disclosed in Table 6. In certain embodiments, such nucleic acid sequences are selected from those nucleic acid sequences that are disclosed in Table 6, and compliments thereof.

[0140] In certain embodiments, isolated nucleic acid sequences are provided that encode the inventive antibodies and antigen-binding fragments thereof, wherein such nucleic acid sequences comprise sequences that encode the CDRH3 amino acid sequence of the antibodies designated Antibody Number 232 through Antibody Number 372 as disclosed in Table 6. In certain embodiments, such nucleic acid sequences are selected from those nucleic acid sequences that are disclosed in Table 6, and compliments thereof.

[0141] In certain embodiments, isolated nucleic acid sequences are provided that encode the inventive antibodies and antigen-binding fragments thereof, wherein such nucleic acid sequences comprise sequences that encode the CDRH2 amino acid sequences of the antibodies designated Antibody Number 232 through Antibody Number 372 as disclosed in Table 6. In certain embodiments, such nucleic acid sequences are selected from those nucleic acid sequences that are disclosed in Table 6, and compliments thereof.

[0142] In certain embodiments, isolated nucleic acid sequences are provided that encode the inventive antibodies and antigen-binding fragments thereof, wherein such nucleic acid sequences comprise sequences that encode the CDRH1 amino acid sequences of the antibodies designated Antibody Number 232 through Antibody Number 372 as disclosed in Table 6. In certain embodiments, such nucleic acid sequences are selected from those nucleic acid sequences that are disclosed in Table 6, and compliments thereof.

[0143] In certain embodiments, isolated nucleic acid sequences are provided that encode the inventive antibodies and antigen-binding fragments thereof, wherein such nucleic acid sequences comprise sequences that encode the CDRL3 amino acid sequences of the antibodies designated Antibody Number 232 through Antibody Number 372 as disclosed in Table 6. In certain embodiments, such nucleic acid sequences are selected from those nucleic acid sequences that are disclosed in Table 6, and compliments thereof.

[0144] In certain embodiments, isolated nucleic acid sequences are provided that encode the inventive antibodies and antigen-binding fragments thereof, wherein such nucleic acid sequences comprise sequences that encode the CDRL2 amino acid sequences of the antibodies designated Antibody Number 232 through Antibody Number 372 as disclosed in Table 6. In certain embodiments, such nucleic acid sequences are selected from those nucleic acid sequences that are disclosed in Table 6, and compliments thereof.

[0145] In certain embodiments, isolated nucleic acid sequences are provided that encode the inventive antibodies and antigen-binding fragments thereof, wherein such nucleic acid sequences comprise sequences that encode the CDRL1 amino acid sequences of the antibodies designated Antibody Number 232 through Antibody Number 372 as disclosed in Table 6. In certain embodiments, such nucleic acid sequences are selected from those nucleic acid sequences that are disclosed in Table 6, and compliments thereof.

[0146] In certain embodiments, isolated nucleic acid sequences are provided that encode the inventive antibodies and antigen-binding fragments thereof, wherein such nucleic acid sequences comprise sequences that encode the heavy chain (HC) amino acid sequences of the antibodies designated Antibody Number 232 through Antibody Number 372 as disclosed in Table 6. In certain embodiments, such nucleic acid sequences are selected from those nucleic acid sequences that are disclosed in Table 6, and compliments thereof.

[0147] In certain embodiments, isolated nucleic acid sequences are provided that encode the inventive antibodies and antigen-binding fragments thereof, wherein such nucleic acid sequences comprise sequences that encode the heavy chain (LC) amino acid sequences of the antibodies designated Antibody Number 232 through Antibody Number 372 as disclosed in Table 6. In certain embodiments, such nucleic acid sequences are selected from those nucleic acid sequences that are disclosed in Table 6, and compliments thereof.

[0148] In certain embodiments, isolated nucleic acid sequences are provided that encode the inventive antibodies and antigen-binding fragments thereof, wherein such nucleic acid sequences comprise sequences are each selected from the group consisting of sequences that are at least 70% identical; at least 75% identical; 80% identical; at least 85% identical; at least 90% identical; at least 95% identical; at least 96% identical; at least 97% identical; at least 98% identical; at least 99% identical; at least 100% identical, and/or all percentages of identity in between; to any one of the nucleic acid sequences that are disclosed in Table 6, and compliments thereof.

[0149] In certain embodiments, expression vectors are provided comprising the isolated nucleic acid sequences disclose herein and throughout, and in particular in the immediately preceding ten paragraphs.

[0150] In certain embodiments, host cells transfected, transformed, or transduced with the nucleic acid sequences and/or the expression vectors disclosed immediately above are provided.

### Epitope Mapping and Related Technologies

[0151] As described above and as demonstrated in the EXAMPLES, Applicant has characterized the epitopic specificities, bin assignments, and antigenic site assignments of the inventive antibodies and antigen-binding fragments thereof. In addition to the methods for conducting such characterization, various other techniques are available to the artisan that can be used to carry out such characterization or to otherwise ascertain whether an antibody “interacts with one or more amino acids” within a polypeptide or protein. Exemplary techniques include, for example, a routine cross-blocking assay such as that described Antibodies, Harlow and Lane (Cold Spring Harbor Press, Cold Spring Harb., N.Y.) can be performed. Other methods include alanine scanning mutational analysis, peptide blot analysis (Reineke (2004) Methods Mol Biol 248:443-63), peptide cleavage analysis crystallographic studies and NMR analysis. In addition, methods such as epitope excision, epitope extraction and chemical modification of antigens can be employed (Tomer (2000) Protein Science 9: 487-496). Another method that can be used to identify the amino acids within a polypeptide with which an antibody interacts is hydrogen/deuterium exchange detected by mass spectrometry. In general terms, the hydrogen/deuterium exchange method involves deuterium-labeling the protein of interest, followed by binding the antibody to the deuterium-labeled protein. Next, the protein/antibody complex is transferred to water and exchangeable protons within amino acids that are protected by the antibody complex undergo deuterium-to-hydrogen back-exchange at a slower rate than exchangeable protons within amino acids that are not part of the interface. As a result, amino acids that form part of the protein/antibody interface may retain deuterium and therefore exhibit relatively higher mass compared to amino acids not included in the interface. After dissociation of the antibody, the target protein is subjected to protease cleavage and mass spectrometry analysis, thereby revealing the deuterium-labeled residues that correspond to the specific amino acids with which the antibody interacts. See, e.g., Ehring (1999) Analytical Biochemistry 267 (2):252-259; Engen and Smith (2001) Anal. Chem. 73:256A-265A.

[0152] As the artisan will understand, an epitope can be formed both from contiguous amino acids or noncontiguous amino acids juxtaposed by tertiary folding of a protein. Epitopes formed from contiguous amino acids are typically retained on exposure to denaturing solvents, whereas epitopes formed by tertiary folding are typically lost on treatment with denaturing solvents. An epitope typically includes at least 3, and more usually, at least 5 or 8-10 amino acids in a unique spatial conformation.

[0153] Modification-Assisted Profiling (MAP), also known as Antigen Structure-based Antibody Profiling (ASAP) is a method that categorizes large numbers of monoclonal antibodies (mAbs) directed against the same antigen according to the similarities of the binding profile of each antibody to chemically or enzymatically modified antigen surfaces (U.S. Publ. No. 2004/0101920). Each category may reflect a unique epitope either distinctly different from or partially overlapping with epitope represented by another category. This technology allows rapid filtering of genetically identical antibodies, such that characterization can be focused on genetically distinct antibodies. When applied to hybridoma screening, MAP may facilitate identification of rare hybridoma clones that produce mAbs having the desired characteristics. MAP may be used to sort the antibodies of the invention into groups of antibodies binding different epitopes.

[0154] In certain embodiments, the inventive antibodies and/or antigen-binding fragments thereof interact with an amino acid sequence comprising the amino acid residues that are altered in one or more of the F protein patch variants disclosed, e.g., in the EXAMPLES and which are depicted in, e.g., FIG. 7A and which are designated as RSV F Variants 1, 2, 3, 4, 5, 6, 7, 8, 9, and DG. In certain embodiments, such inventive antibodies and antigen-binding fragments thereof interact with an amino acid sequence comprising the amino acid residues that are altered in RSV F Variant 2. In certain embodiments, the inventive antibodies and/or antigen-binding fragments thereof interact with amino acid residues that extend beyond the region(s) identified above by about 5 to 10 amino acid residues, or by about 10 to 15 amino acid residues, or by about 15 to 20 amino acid residues towards either the amino terminal or the carboxy terminal of the RSV-F protein.

[0155] In certain embodiments, the antibodies of the present invention do not bind to the same epitope on RSV-F protein as palivizumab, motavizumab, MPE8, or AM-14.

[0156] As the artisan understands, one can easily determine whether an antibody binds to the same epitope as, or competes for binding with, a reference anti-RSV-F antibody by using routine methods available in the art. For example, to determine if a test antibody binds to the same epitope as a reference RSV-F antibody of the invention, the reference antibody is allowed to bind to a RSV-F protein or peptide under saturating conditions. Next, the ability of a test antibody to bind to the RSV-F molecule is assessed. If the test antibody is able to bind to RSV-F following saturation binding with the reference anti-RSV-F antibody, it can be concluded that the test antibody binds to a different epitope than the reference anti-RSV-F antibody. On the other hand, if the test antibody is not able to bind to the RSV-F molecule following saturation binding with the reference anti-RSV-F antibody, then the test antibody may bind to the same epitope as the epitope bound by the reference anti-RSV-F antibody of the invention.

[0157] To determine if an antibody competes for binding with a reference anti-RSV-F antibody, the above-described binding methodology is performed in two orientations: In a first orientation, the reference antibody is allowed to bind to a RSV-F molecule under saturating conditions followed by assessment of binding of the test antibody to the RSV-F molecule. In a second orientation, the test antibody is allowed to bind to a RSV-F molecule under saturating conditions followed by assessment of binding of the reference antibody to the RSV-F molecule. If, in both orientations, only the first (saturating) antibody is capable of binding to the RSV-F molecule, then it is concluded that the test antibody and the reference antibody compete for binding to RSV-F. As will be appreciated by a person of ordinary skill in the art, an antibody that competes for binding with a reference antibody may not necessarily bind to the identical epitope as the reference antibody, but may sterically block binding of the reference antibody by binding an overlapping or adjacent epitope.

[0158] Two antibodies bind to the same or overlapping epitope if each competitively inhibits (blocks) binding of the other to the antigen. That is, a 1-, 5-, 10-, 20- or 100-fold excess of one antibody inhibits binding of the other by at least 50% but preferably 75%, 90% or even 99% as measured in a competitive binding assay (see, e.g., Junghans et al., Cancer Res. (1990) 50:1495-1502). Alternatively, two antibodies have the same epitope if essentially all amino acid mutations in the antigen that reduce or eliminate binding of one antibody reduce or eliminate binding of the other. Two antibodies have overlapping epitopes if some amino acid mutations that reduce or eliminate binding of one antibody reduce or eliminate binding of the other.

[0159] Additional routine experimentation (e.g., peptide mutation and binding analyses) can then be carried out to confirm whether the observed lack of binding of the test antibody is in fact due to binding to the same epitope as the reference antibody or if steric blocking (or another phenomenon) is responsible for the lack of observed binding. Experiments of this sort can be performed using ELISA, RIA, surface plasmon resonance, flow cytometry or any other quantitative or qualitative antibody-binding assay available in the art.

### Immunoconjugates

[0160] The invention encompasses a human RSV-F monoclonal antibody conjugated to a therapeutic moiety (“immunoconjugate”), such as an agent that is capable of reducing the severity of primary infection with RSV and/or HMPV, or to ameliorate at least one symptom associated with RSV infection and/or HMPV infection, including coughing, fever, pneumonia, or the severity thereof. Such an agent may be a second different antibody to RSV-F and/or HMPV, or a vaccine. The type of therapeutic moiety that may be conjugated to the anti-RSV-F antibody and/or anti-HMPV antibody and will take into account the condition to be treated and the desired therapeutic effect to be achieved. Alternatively, if the desired therapeutic effect is to treat the sequelae or symptoms associated with RSV and/or HMPV infection, or any other condition resulting from such infection, such as, but not limited to, pneumonia, it may be advantageous to conjugate an agent appropriate to treat the sequelae or symptoms of the condition, or to alleviate any side effects of the antibodies of the invention. Examples of suitable agents for forming immunoconjugates are known in the art, see for example, WO 05/103081.

### Multi-Specific Antibodies

[0161] The antibodies of the present invention may be mono-specific, bi-specific, or multi-specific. Multi-specific antibodies may be specific for different epitopes of one target polypeptide or may contain antigen-binding domains specific for more than one target polypeptide. See, e.g., Tutt et al., 1991, J. Immunol. 147:60-69; Kufer et al., 2004, Trends Biotechnol. 22:238-244. The antibodies of the present invention can be linked to or co-expressed with another functional molecule, e.g., another peptide or protein. For example, an antibody or fragment thereof can be functionally linked {e.g., by chemical coupling, genetic fusion, noncovalent association or otherwise) to one or more other molecular entities, such as another antibody or antibody fragment to produce a bi-specific or a multi-specific antibody with a second binding specificity.

[0162] An exemplary bi-specific antibody format that can be used in the context of the present invention involves the use of a first immunoglobulin (Ig) C_{H}3 domain and a second Ig C_{H}3 domain, wherein the first and second Ig C_{H}3 domains differ from one another by at least one amino acid, and wherein at least one amino acid difference reduces binding of the bi-specific antibody to Protein A as compared to a bi-specific antibody lacking the amino acid difference. In one embodiment, the first Ig C_{H}3 domain binds Protein A and the second Ig C_{H}3 domain contains a mutation that reduces or abolishes Protein A binding such as an H95R modification (by IMGT exon numbering; H435R by EU numbering). The second C_{H}3 may further comprise a Y96F modification (by IMGT; Y436F by EU). Further modifications that may be found within the second C_{H3} include: D16E, L18M, N44S, K52N, V57M, and V82I (by IMGT; D356E, L358M, N384S, K392N, V397M, and V422I by EU) in the case of IgG1 antibodies; N44S, K52N, and V82I (IMGT; N384S, K392N, and V422I by EU) in the case of IgG2 antibodies; and Q15R, N44S, K52N, V57M, R69K, E79Q, and V82I (by IMGT; Q355R, N384S, K392N, V397M, R409K, E419Q, and V422I by EU) in the case of IgG4 antibodies. Variations on the bi-specific antibody format described above are contemplated within the scope of the present invention.

### Therapeutic Administration and Formulations

[0163] The invention provides therapeutic compositions (including pharmaceutical compositions) comprising the inventive anti-RSV-F and/or HMPV antibodies or antigen-binding fragments thereof. The administration of therapeutic compositions in accordance with the invention will be administered with suitable carriers, excipients, and other agents that are incorporated into formulations to provide improved transfer, delivery, tolerance, and the like. A multitude of appropriate formulations can be found in the formulary known to all pharmaceutical chemists: Remington's Pharmaceutical Sciences, Mack Publishing Company, Easton, Pa. These formulations include, for example, powders, pastes, ointments, jellies, waxes, oils, lipids, lipid (cationic or anionic) containing vesicles (such as LIPOFECTIN™), DNA conjugates, anhydrous absorption pastes, oil-in-water and water-in-oil emulsions, emulsions carbowax (polyethylene glycols of various molecular weights), semi-solid gels, and semi-solid mixtures containing carbowax. See also Powell et al. “Compendium of excipients for parenteral formulations” PDA (1998) J Pharm Sci Technol 52:238-31 1.

[0164] The dose of each of the antibodies of the invention may vary depending upon the age and the size of a subject to be administered, target disease, conditions, route of administration, and the like. When the antibodies of the present invention are used for treating a RSV infection and/or HMPV infection in a patient, or for treating one or more symptoms associated with a RSV infection and/or HMPV infection, such as the cough or pneumonia associated with a RSV infection and/or HMPV in a patient, or for lessening the severity of the disease, it is advantageous to administer each of the antibodies of the present invention intravenously or subcutaneously normally at a single dose of about 0.01 to about 30 mg/kg body weight, more preferably about 0.1 to about 20 mg/kg body weight, or about 0.1 to about 15 mg/kg body weight, or about 0.02 to about 7 mg/kg body weight, about 0.03 to about 5 mg/kg body weight, or about 0.05 to about 3 mg/kg body weight, or about 1 mg/kg body weight, or about 3.0 mg/kg body weight, or about 10 mg/kg body weight, or about 20 mg/kg body weight. Multiple doses may be administered as necessary. Depending on the severity of the condition, the frequency and the duration of the treatment can be adjusted. In certain embodiments, the antibodies or antigen-binding fragments thereof of the invention can be administered as an initial dose of at least about 0.1 mg to about 800 mg, about 1 mg to about 600 mg, about 5 mg to about 300 mg, or about 10 mg to about 150 mg, to about 100 mg, or to about 50 mg. In certain embodiments, the initial dose may be followed by administration of a second or a plurality of subsequent doses of the antibodies or antigen-binding fragments thereof in an amount that can be approximately the same or less than that of the initial dose, wherein the subsequent doses are separated by at least 1 day to 3 days; at least one week, at least 2 weeks; at least 3 weeks; at least 4 weeks; at least 5 weeks; at least 6 weeks; at least 7 weeks; at least 8 weeks; at least 9 weeks; at least 10 weeks; at least 12 weeks; or at least 14 weeks.

[0165] Various delivery systems are known and can be used to administer the pharmaceutical composition of the invention, e.g., encapsulation in liposomes, microparticles, microcapsules, recombinant cells capable of expressing the mutant viruses, receptor mediated endocytosis (see, e.g., Wu et al. (1987) J. Biol. Chem. 262:4429-4432). Methods of introduction include, but are not limited to, intradermal, transdermal, intramuscular, intraperitoneal, intravenous, subcutaneous, intranasal, epidural and oral routes. The composition may be administered by any convenient route, for example by infusion or bolus injection, by absorption through epithelial or mucocutaneous linings {e.g., oral mucosa, nasal mucosa, rectal and intestinal mucosa, etc.) and may be administered together with other biologically active agents. Administration can be systemic or local. It may be delivered as an aerosolized formulation (See U.S. Publ. No. 2011/0311515 and U.S. Publ. No. 2012/0128669). The delivery of agents useful for treating respiratory diseases by inhalation is becoming more widely accepted (See A. J. Bitonti and J. A. Dumont, (2006), Adv. Drug Deliv. Rev, 58:1 106-1118). In addition to being effective at treating local pulmonary disease, such a delivery mechanism may also be useful for systemic delivery of antibodies (See Maillet et al. (2008), Pharmaceutical Research, Vol. 25, No. 6, 2008).

[0166] The pharmaceutical composition can be also delivered in a vesicle, in particular a liposome (see, for example, Langer (1990) Science 249:1527-1533).

[0167] In certain situations, the pharmaceutical composition can be delivered in a controlled release system. In one embodiment, a pump may be used. In another embodiment, polymeric materials can be used. In yet another embodiment, a controlled release system can be placed in proximity of the composition's target, thus requiring only a fraction of the systemic dose.

[0168] The injectable preparations may include dosage forms for intravenous, subcutaneous, intracutaneous and intramuscular injections, drip infusions, etc. These injectable preparations may be prepared by methods publicly known. For example, the injectable preparations may be prepared, e.g., by dissolving, suspending or emulsifying the antibody or its salt described above in a sterile aqueous medium or an oily medium conventionally used for injections. As the aqueous medium for injections, there are, for example, physiological saline, an isotonic solution containing glucose and other auxiliary agents, etc., which may be used in combination with an appropriate solubilizing agent such as an alcohol (e.g., ethanol), a polyalcohol (e.g., propylene glycol, polyethylene glycol), a nonionic surfactant [e.g., polysorbate 80, HCO-50 (polyoxyethylene (50 mol) adduct of hydrogenated castor oil)], etc. As the oily medium, there are employed, e.g., sesame oil, soybean oil, etc., which may be used in combination with a solubilizing agent such as benzyl benzoate, benzyl alcohol, etc. The injection thus prepared is preferably filled in an appropriate ampoule.

[0169] A pharmaceutical composition of the present invention can be delivered subcutaneously or intravenously with a standard needle and syringe. In addition, with respect to subcutaneous delivery, a pen delivery device readily has applications in delivering a pharmaceutical composition of the present invention. Such a pen delivery device can be reusable or disposable. A reusable pen delivery device generally utilizes a replaceable cartridge that contains a pharmaceutical composition. Once all of the pharmaceutical composition within the cartridge has been administered and the cartridge is empty, the empty cartridge can readily be discarded and replaced with a new cartridge that contains the pharmaceutical composition. The pen delivery device can then be reused. In a disposable pen delivery device, there is no replaceable cartridge. Rather, the disposable pen delivery device comes prefilled with the pharmaceutical composition held in a reservoir within the device. Once the reservoir is emptied of the pharmaceutical composition, the entire device is discarded.

[0170] Numerous reusable pen and autoinjector delivery devices have applications in the subcutaneous delivery of a pharmaceutical composition of the present invention. Examples include, but certainly are not limited to AUTOPEN™ (Owen Mumford, Inc., Woodstock, UK), DISETRONIC™ pen (Disetronic Medical Systems, Burghdorf, Switzerland), HUMALOG MIX 75/25™ pen, HUMALOG™ pen, HUMALIN 70/30™ pen (Eli Lilly and Co., Indianapolis, Ind.), NOVOPEN™ I, II and III (Novo Nordisk, Copenhagen, Denmark), NOVOPEN JUNIOR™ (Novo Nordisk, Copenhagen, Denmark), BD™ pen (Becton Dickinson, Franklin Lakes, N.J.), OPTIPEN™, OPTIPEN PRO™ OPTIPEN STARLET™, and OPTICLIK™ (Sanofi-Aventis, Frankfurt, Germany), to name only a few. Examples of disposable pen delivery devices having applications in subcutaneous delivery of a pharmaceutical composition of the present invention include, but certainly are not limited to the SOLOSTAR™ pen (Sanofi-Aventis), the FLEXPEN™ (Novo Nordisk), and the KWIKPEN™ (Eli Lilly), the SURECLICK™ Autoinjector (Amgen, Thousand Oaks, Calif.), the PENLET™ (Haselmeier, Stuttgart, Germany), the EPIPEN (Dey, L.P.) and the HUMIRA™ Pen (Abbott Labs, Abbott Park, Ill.), to name only a few.

[0171] Advantageously, the pharmaceutical compositions for oral or parenteral use described above are prepared into dosage forms in a unit dose suited to fit a dose of the active ingredients. Such dosage forms in a unit dose include, for example, tablets, pills, capsules, injections (ampoules), suppositories, etc. The amount of the aforesaid antibody contained is generally about 5 to about 500 mg per dosage form in a unit dose; especially in the form of injection, it is preferred that the aforesaid antibody is contained in about 5 to about 100 mg and in about 10 to about 250 mg for the other dosage forms.

### Administration Regimens

[0172] According to certain embodiments, multiple doses of an antibody to RSV-F and/or HMPV, or a pharmaceutical composition comprising or encoding for these antibodies, may be administered to a subject over a defined time course. The methods according to this aspect of the invention comprise sequentially administering to a subject multiple doses of an antibody to RSV-F and/or HMPV, or sequentially administering to a subject multiple doses of a pharmaceutical composition comprising or encoding for an antibody of the invention or antigen binding fragment therof. As used herein, “sequentially administering” means that each dose of antibody to RSV-F and/or HMPV, or the pharmaceutical composition, is administered to the subject at a different point in time, e.g., on different days separated by a predetermined interval (e.g., hours, days, weeks or months). The present invention includes methods which comprise sequentially administering to the patient a single initial dose of an antibody to RSV-F and/or HMPV, or a composition comprising or encoding for the antibodies, followed by one or more secondary doses of the antibody to RSV-F and/or HMPV, or the composition, and optionally followed by one or more tertiary doses of the antibody to RSV-F and/or HMPV, or the composition.

[0173] The terms “initial dose,” “secondary doses,” and “tertiary doses,” refer to the temporal sequence of administration of the antibody to RSV-F and/or HMPV or the compositions of the invention. Thus, the “initial dose” is the dose which is administered at the beginning of the treatment regimen (also referred to as the “baseline dose”); the “secondary doses” are the doses which are administered after the initial dose; and the “tertiary doses” are the doses which are administered after the secondary doses. The initial, secondary, and tertiary doses may all contain the same amount of antibody to RSV-F and/or HMPV, but generally may differ from one another in terms of frequency of administration. In certain embodiments, however, the amount of antibody to RSV-F and/or HMPV contained in the initial, secondary and/or tertiary doses vary from one another (e.g., adjusted up or down as appropriate) during the course of treatment. In certain embodiments, two or more (e.g., 2, 3, 4, or 5) doses are administered at the beginning of the treatment regimen as “loading doses” followed by subsequent doses that are administered on a less frequent basis (e.g., “maintenance doses”).

[0174] In one exemplary embodiment of the present invention, each secondary and/or tertiary dose is administered 1 to 26 (e.g., 1 , ½, 2, 2½, 3, 3½, 4, 4½, 5, 5½, 6, 6½, 7 7½, 8, 8½, 9, 9½, 10, 10½, 11, 11½, 12, 12½, 13, 13½, 14, 14½, 15, 15½, 16, 16½, 17, 17½, 18, 18½, 19, 19½, 20, 20½, 21, 21½, 22, 22½, 23, 23½, 24, 24½, 25, 25½, 26, 26½, or more) weeks after the immediately preceding dose. The phrase “the immediately preceding dose,” as used herein, means, in a sequence of multiple administrations, the dose of antibody to RSV-F and/or HMPV which is administered to a patient prior to the administration of the very next dose in the sequence with no intervening doses.

[0175] The methods according to this aspect of the invention may comprise administering to a patient any number of secondary and/or tertiary doses of an antibody to RSV-F and/or HMPV. For example, in certain embodiments, only a single secondary dose is administered to the patient. In other embodiments, two or more (e.g., 2, 3, 4, 5, 6, 7, 8, or more) secondary doses are administered to the patient. Likewise, in certain embodiments, only a single tertiary dose is administered to the patient. In other embodiments, two or more (e.g., 2, 3, 4, 5, 6, 7, 8, or more) tertiary doses are administered to the patient.

[0176] In embodiments involving multiple secondary doses, each secondary dose may be administered at the same frequency as the other secondary doses. For example, each secondary dose may be administered to the patient 1 to 2 weeks after the immediately preceding dose. Similarly, in embodiments involving multiple tertiary doses, each tertiary dose may be administered at the same frequency as the other tertiary doses. For example, each tertiary dose may be administered to the patient 2 to 4 weeks after the immediately preceding dose. Alternatively, the frequency at which the secondary and/or tertiary doses are administered to a patient can vary over the course of the treatment regimen. The frequency of administration may also be adjusted during the course of treatment by a physician depending on the needs of the individual patient following clinical examination.

[0177] Accordingly, in certain embodiments are provided pharmaceutical compositions comprising: one or more of the inventive antibodies or antigen-binding fragments thereof disclosed herein and throughout and a pharmaceutically acceptable carrier and/or one or more excipients. In certain other embodiments are provided pharmaceutical compositions comprising: one or more nucleic acid sequences encoding one or more inventive antibodies or antigen-binding fragments thereof; or one or more the expression vectors harbouring such nucleic acid sequences; and a pharmaceutically acceptable carrier and/or one or more excipients.

### Therapeutic Uses of the Antibodies and Pharmaceutical Compositions

[0178] Due to their binding to and interaction with the RSV fusion protein (RSV-F), it is believed that the inventive antibodies and antigen-binding fragments thereof are useful—without wishing to be bound to any theory—for preventing fusion of the virus with the host cell membrane, for preventing cell to cell virus spread, and for inhibition of syncytia formation. Additionally, as Applicant has demonstrated herein that, surprisingly, a subset of the inventive anti-RSV antibodies and antigen-binding fragment thereof display crass-neutralizing potency agains HMPV, the inventive antibodies and antigen-binding fragments thereof are advantageous for preventing an infection of a subject with RSV and/or HMPV when administered prophylactically. Alternatively, the antibodies of the present invention may be useful for ameliorating at least one symptom associated with the infection, such as coughing, fever, pneumonia, or for lessening the severity, duration, and/or frequency of the infection. The antibodies of the invention are also contemplated for prophylactic use in patients at risk for developing or acquiring an RSV infection and/or HMPV infection. These patients include pre-term infants, full term infants born during RSV season (late fall to early spring), the elderly (for example, in anyone 65 years of age or older) and/or HMPV season, or patients immunocompromised due to illness or treatment with immunosuppressive therapeutics, or patients who may have an underlying medical condition that predisposes them to an RSV infection (for example, cystic fibrosis patients, patients with congestive heart failure or other cardiac conditions, patients with airway impairment, patients with COPD) and/or HMPV infection. It is contemplated that the antibodies of the invention may be used alone, or in conjunction with a second agent, or third agent for treating RSV infection and/or HMPV infection, or for alleviating at least one symptom or complication associated with the RSV infection and/or HMPV infection, such as the fever, coughing, bronchiolitis, or pneumonia associated with, or resulting from such an infection. The second or third agents may be delivered concurrently with the antibodies of the invention, or they may be administered separately, either before or after the antibodies of the invention. The second or third agent may be an anti-viral such as ribavirin, an NSAID or other agents to reduce fever or pain, another second but different antibody that specifically binds RSV-F, an agent (e.g. an antibody) that binds to another RSV antigen, such as RSV-G, a vaccine against RSV, an siRNA specific for an RSV antigen.

[0179] In yet a further embodiment of the invention the present antibodies are used for the preparation of a pharmaceutical composition for treating patients suffering from a RSV infection and/or HMPV infection. In yet another embodiment of the invention the present antibodies are used for the preparation of a pharmaceutical composition for reducing the severity of a primary infection with RSV and/or HMPV, or for reducing the duration of the infection, or for reducing at least one symptom associated with the RSV infection and/or the HMPV infection. In a further embodiment of the invention the present antibodies are used as adjunct therapy with any other agent useful for treating an RSV infection and/or and HMPV infectin, including an antiviral, a toxoid, a vaccine, a second RSV-F antibody, or any other antibody specific for an RSV antigen, including an RSV-G antibody, or any other palliative therapy known to those skilled in the art.

[0180] Accordingly, in certain embodiments are provided methods of treating or preventing a Respiratory Syncytial Virus (RSV) infection, or at least one symptom associated with RSV infection, comprising administering to a patient in need thereof or suspected of being in need thereof one or more of the inventive antibodies or antigen-binding fragments thereof disclosed herein and throughout (or pharmaceutical composition of the invention), such as, e.g., one or more of the anti-RSV antibodies disclosed in Table 6, such that the RSV infection is treated or prevented, or the at least on symptom associated with RSV infection is treated, alleviated, or reduced in severity.

[0181] In certain other embodiments are provided methods of treating or preventing a Respiratory Syncytial Virus (RSV) infection, or at least one symptom associated with RSV infection, comprising administering to a patient in need thereof or suspected of being in need thereof a nucleic acid sequence encoding one or more of the inventive antibodies or antigen-binding fragments thereof, such nucleic acid sequenced disclosed in Table 6 and compliments thereof, such that the RSV infection is treated or prevented, or the at least on symptom associated with RSV infection is treated, alleviated, or reduced in severity.

[0182] In additional embodiments are provided methods of treating or preventing a Respiratory Syncytial Virus (RSV) infection, are at least one symptom associated with RSV infection, comprising administering to a patient in need thereof or suspected of being in need thereof a host cell harboring a nucleic acid sequence or an expression vector comprising such a nucleic aci sequence, wherein such nucleic acid sequences is selected from the group consisting of sequences disclosed in Table 6 and compliments thereof, such that the RSV infection is treated or prevented, or the at least on symptom associated with RSV infection is treated, alleviated, or reduced in severity.

[0183] In additional embodiments are provided methods of treating or preventing a Respiratory Syncytial Virus (RSV) infection, are at least one symptom associated with RSV infection, comprising administering to a patient in need thereof or suspected of being in need thereof a pharmaceutical composition comprising either: one or more of the inventive antibodies or antigen-binding fragments thereof as disclosed in Table 6; one or more nucleic acid sequences or an expression vectors comprising such a nucleic acid sequence, wherein such nucleic acid sequences are selected from the group consisting of sequences disclosed in Table 6 and compliments thereof; one or more host cells harboring one or more nucleic acid sequences or an expression vectors comprising such one or more nucleic acid sequences, wherein such nucleic acid sequences are selected from the group consisting of sequences disclosed in Table 6 and compliments thereof; and a pharmaceutically acceptable carrier and/or one or more excipients, such that the RSV infection is treated or prevented, or the at least on symptom associated with RSV infection is treated, alleviated, or reduced in severity.

[0184] In certain embodiments are provided methods of treating or preventing either a Respiratory Syncytial Virus (RSV) infection or a human metapneumovirus (HMPV) infection, are at least one symptom associated with said RSV infection or said HMPV infection, comprising administering to a patient in need thereof or suspected of being in need thereof one or more of the inventive antibodies or antigen-binding fragments thereof disclosed herein and throughout, such as, e.g., one or more of the anti-RSV antibodies disclosed in Table 6, such that the RSV infection is treated or prevented, or the at least on symptom associated with RSV infection is treated, alleviated, or reduced in severity. In certain embodiments, the one or more antibodies or antigen-binding fragments thereof comprises Antibody Number 340 as disclosed in Table 6.

[0185] In certain other embodiments are provided methods of treating or preventing either a Respiratory Syncytial Virus (RSV) infection or a human metapneumovirus (HMPV) infection, are at least one symptom associated with said RSV infection or said HMPV infection, comprising administering to a patient in need thereof or suspected of being in need thereof a nucleic acid sequence encoding one or more of the inventive antibodies or antigen-binding fragments thereof, such nucleic acid sequenced disclosed in Table 6 and compliments thereof, such that the RSV infection is treated or prevented, or the at least on symptom associated with RSV infection is treated, alleviated, or reduced in severity. In certain embodiments, the one or more antibodies or antigen-binding fragments thereof comprises Antibody Number 340 as disclosed in Table 6.

[0186] In additional embodiments are provided methods of treating or preventing either a Respiratory Syncytial Virus (RSV) infection or a human metapneumovirus (HMPV) infection, are at least one symptom associated with said RSV infection or said HMPV infection, comprising administering to a patient in need thereof or suspected of being in need thereof a host cell harboring a nucleic acid sequence or an expression vector comprising such a nucleic acid sequence, wherein such nucleic acid sequences is selected from the group consisting of sequences disclosed in Table 6 and compliments thereof, such that the RSV infection is treated or prevented, or the at least on symptom associated with RSV infection is treated, alleviated, or reduced in severity. In certain embodiments, the one or more antibodies or antigen-binding fragments thereof comprises Antibody Number 340 as disclosed in Table 6.

[0187] In additional embodiments are provided methods of treating or preventing either a Respiratory Syncytial Virus (RSV) infection or a human metapneumovirus (HMPV) infection, are at least one symptom associated with said RSV infection or said HMPV infection, comprising administering to a patient in need thereof or suspected of being in need thereof a pharmaceutical composition comprising either: one or more of the inventive antibodies or antigen-binding fragments thereof as disclosed in Table 6; one or more nucleic acid sequences or an expression vectors comprising such a nucleic acid sequence, wherein such nucleic acid sequences are selected from the group consisting of sequences disclosed in Table 6 and compliments thereof; one or more host cells harboring one or more nucleic acid sequences or an expression vectors comprising suchone or more nucleic acid sequences, wherein such nucleic acid sequences are selected from the group consisting of sequences disclosed in Table 6 and compliments thereof; and a pharmaceutically acceptable carrier and/or one or more excipients, such that the RSV infection is treated or prevented, or the at least on symptom associated with RSV infection is treated, alleviated, or reduced in severity. In certain embodiments, the one or more antibodies or antigen-binding fragments thereof comprises Antibody Number 340 as disclosed in Table 6.

### Combination Therapies

[0188] As noted above, according to certain embodiments, the disclosed methods comprise administering to the subject one or more additional therapeutic agents in combination with an antibody to RSV-F and or HMPV. As used herein, the expression “in combination with” means that the additional therapeutic agents are administered before, after, or concurrent with the pharmaceutical composition comprising the anti-RSV-F antibody. The term “in combination with” also includes sequential or concomitant administration of the anti-RSV-F antibody and a second therapeutic agent.

[0189] For example, when administered “before” the pharmaceutical composition comprising the anti-RSV-F antibody, the additional therapeutic agent may be administered about 72 hours, about 60 hours, about 48 hours, about 36 hours, about 24 hours, about 12 hours, about 10 hours, about 8 hours, about 6 hours, about 4 hours, about 2 hours, about 1 hour, about 30 minutes, about 15 minutes or about 10 minutes prior to the administration of the pharmaceutical composition comprising the anti-RSV-F antibody. When administered “after” the pharmaceutical composition comprising the anti-RSV-F antibody, the additional therapeutic agent may be administered about 10 minutes, about 15 minutes, about 30 minutes, about 1 hour, about 2 hours, about 4 hours, about 6 hours, about 8 hours, about 10 hours, about 12 hours, about 24 hours, about 36 hours, about 48 hours, about 60 hours or about 72 hours after the administration of the pharmaceutical composition comprising the anti-RSV-F antibodies. Administration “concurrent” or with the pharmaceutical composition comprising the anti-RSV-F antibody means that the additional therapeutic agent is administered to the subject in a separate dosage form within less than 5 minutes (before, after, or at the same time) of administration of the pharmaceutical composition comprising the anti-RSV-F antibody, or administered to the subject as a single combined dosage formulation comprising both the additional therapeutic agent and the anti-RSV-F antibody.

[0190] Combination therapies may include an anti-RSV-F antibody of the invention and any additional therapeutic agent that may be advantageously combined with an antibody of the invention, or with a biologically active fragment of an antibody of the invention.

[0191] For example, a second or third therapeutic agent may be employed to aid in reducing the viral load in the lungs, such as an antiviral, for example, ribavirin. The antibodies may also be used in conjunction with other therapies, as noted above, including a toxoid, a vaccine specific for RSV, a second antibody specific for RSV-F, or an antibody specific for another RSV antigen, such as RSV-G.

### Diagnostic Uses of the Antibodies

[0192] The inventive anti-RSV antibodies and antigen-binding fragments thereof may also be used to detect and/or measure RSV and/or HMPV in a sample, e.g., for diagnostic purposes. It is envisioned that confirmation of an infection thought to be caused by RSV and/or HMPV may be made by measuring the presence of the virus through use of any one or more of the antibodies of the invention. Exemplary diagnostic assays for RSV and/or HMPV may comprise, e.g., contacting a sample, obtained from a patient, with an anti-RSV-F and/or HMPV antibody of the invention, wherein the anti-RSV-F and/or HMPV antibody is labeled with a detectable label or reporter molecule or used as a capture ligand to selectively isolate the virus containing the F protein from patient samples. Alternatively, an unlabeled anti-RSV-F and/or HMPV antibody can be used in diagnostic applications in combination with a secondary antibody which is itself detectably labeled. The detectable label or reporter molecule can be a radioisotope, such as ³H, ¹⁴C, ³²P, ³⁵S, or ¹²⁵l; a fluorescent or chemiluminescent moiety such as fluorescein isothiocyanate, or rhodamine; or an enzyme such as alkaline phosphatase, β-galactosidase, horseradish peroxidase, or luciferase. Specific exemplary assays that can be used to detect or measure RSV containing the F protein and/or HMPV in a sample include enzyme-linked immunosorbent assay (ELISA), radioimmunoassay (RIA), and fluorescence-activated cell sorting (FACS).

[0193] Samples that can be used in RSV and/or HMPV diagnostic assays according to the present invention include any tissue or fluid sample obtainable from a patient, which contains detectable quantities of RSV-F protein and/or HMPV, or fragments thereof, under normal or pathological conditions. Generally, levels of RSV-F and/or HMPV in a particular sample obtained from a healthy patient (e.g., a patient not afflicted with a disease or condition associated with the presence of RSV-F and/or HMPV) will be measured to initially establish a baseline, or standard, level of the F protein from RSV and/or HMPV. This baseline level of RSV-F and/or HMPV can then be compared against the levels of RSV-F and/or HMPV measured in samples obtained from individuals suspected of having an RSV and/or HMPV infection, or symptoms associated with such infection.

### EXAMPLES

[0194] Applicant has comprehensively profiled the human antibody response to RSV fusion protein (F) by isolating and characterizing 133 RSV F-specific monoclonal antibodies from the memory B cells of a healthy adult donor, and used these antibodies to comprehensively map the antigenic topology of RSV F. The antibody response to RSV F was determined to be comprised of a broad diversity of clones that target several antigenic sites. Nearly half of the most potent antibodies target a previously undefined site of vulnerability near the apex of the prefusion conformation of RSV F (preF), providing strong support for the development of RSV antibodies that target this region, as well as vaccine candidates that preserve the membrane-distal hemisphere of the preF protein. Additionally, this class of antibodies displayed convergent sequence features, thus providing a future means to rapidly detect these types of antibodies in human samples. Many of the antibodies that bound preF-specific surfaces from this donor were over 100 times more potent than palivizumab, and one antibody cross-neutralized human metapneumovirus (HMPV). Taken together, the results have implications for the design and evaluation of RSV vaccine and antibody-based therapeutic candidates, and offer new options for passive prophylaxis.

Large-Scale Isolation of RSV F-Specific Monoclonal Antibodies from Healthy Adult Human Donors

[0195] In order to comprehensively profile the human antibody response to RSV F, Applicant isolated and characterized 133 monoclonal antibodies from the memory B cells of a healthy adult donor (“donor 006”). Although this donor did not have a documented history of RSV infection, healthy adults are expected to have had multiple RSV infections throughout life (26).

[0196] The magnitude of the memory B cell response in this donor to RSV F was assessed by staining peripheral B cells with a mixture of fluorescently labeled pre- and postfusion RSV F sorting probes (FIG. 6A through 6B) (11, 15). Both proteins were dual-labeled in order to eliminate background due to non-specific fluorochrome binding (27). Flow cytometric analysis revealed that 0.04-0.18% of class-switched (IgG⁺ and IgA⁺) peripheral B cells were specific for RSV F (FIG. 1A and FIG. B), which is significantly lower than the percentage of RSV F-specific cells observed after experimental RSV infection and suggests that this donor was probably not recently exposed to RSV (28). Notably, index sorting showed that 17-38% of circulating RSV F-specific B cells express IgA, indicating that IgA memory B cells to RSV F are present in peripheral blood (FIG. 1B).

[0197] Approximately 200 RSV F-specific B cells were single-cell sorted from the donor sample, and antibody variable heavy (VH) and variable light (VL) chain genes were rescued by single-cell PCR (29). One hundred thirty-three (133) cognate heavy and light chain pairs were subsequently cloned and expressed as full-length IgGs in an engineered strain of Saccharomyces cerevisiae for further characterization (30). Preliminary binding studies showed that approximately 80% of antibodies cloned from RSV F glycoprotein (F)-specific B cells bound to recombinant RSV F proteins.

### Sequence Analysis of RSV F-Specific Antibody Repertoires

[0198] Sequence analysis of the isolated monoclonal antibodies revealed that the RSV-F specific repertoire was highly diverse, containing over 70 unique lineages (FIG. 1C and Table 2). This result is in stark contrast to the relatively restricted repertoires observed in HIV-infected patients (31), or in healthy donors after influenza vaccination (32). Compared to non-RSV-reactive antibodies (33), the RSV F-specific repertoires were skewed, generally, toward certain VH germline genes (VH1-18, VH1-2, VH1-69, VH2-70, VH4-304, and VH5-51) (FIG. 1D and Table 2) and longer heavy chain third complementarity-determining region (CDRH3) lengths (generally, approximately 14-18 amino acids in length; FIG. 1E and Table 2). Interestingly, a bias toward VH1-69 has also been observed in anti-HIV-1, anti-influenza, and anti-HCV repertoires (34-36), and recent studies have shown that there is a significant increase in the relative usage of VH1-18, VH1-2, and VH1-69 during acute dengue infection (37). Hence, it appears that these particular germline gene segments may have inherent properties that facilitate recognition of viral envelope proteins.

[0199] The average level of somatic hypermutation (SHM) ranged generally between 16 and 30 nucleotide substitutions per VH gene (excluding CDRH3) (FIG. 1F and Table 2), which is comparable to the average level of SHM observed in anti-influenza antibody repertoires (32, 38) and consistent with the recurrent nature of RSV infection (26). Interestingly, several antibodies contained 40 or greater VH gene nucleotide substitutions, suggesting that multiple rounds of RSV infection can result in antibodies with very high levels of somatic hypermutation (SHM).

### A Large Proportion of Antibodies Bind Exclusively to PreF

[0200] We next measured the apparent binding affinities of the IgGs to furin-cleaved RSV F ectodomains stabilized in the prefusion (DS-Cav1) or postfusion (F ΔFP) conformation using biolayer interferometry (11, 15). A relatively large proportion of the antibodies (36-67%) bound exclusively to preF (FIG. 2A and FIG. B; Table 3). The vast majority of remaining antibodies bound to both pre- and postF, with only 5-7% of antibodies showing exclusive postF specificity (FIG. 2A and FIG. B; Table 3). The low prevalence of postF-specific antibodies in these donor repertoires is consistent with the observation that less than 10% of anti-RSV F serum-binding activity specifically targets postF (8). Interestingly, however, the majority of cross-reactive antibodies bound with higher apparent affinity to postF (FIG. 2A; Table 3), suggesting that these antibodies were probably elicited by and/or affinity matured against postF in vivo. Hence, the significantly higher proportion of preF- versus postF-specific antibodies is likely due to the higher immunogenicity of the unique surfaces on preF compared to postF, rather than an increased abundance of preF in vivo. Finally, as expected based on the relatively high degree of sequence conservation between RSV subtypes, most of the antibodies showed binding reactivity to F proteins derived from both subtypes A and B (FIG. 2C; Table 3).

[0201] Since certain antiviral antibody specificities have been associated with poly- and autoreactivity (39-41), we also tested the RSV antibodies for polyreactivity using a previously described high-throughput assay that correlates with down-stream behaviors such as serum clearance (42, 43). One hundred and seventy-seven clinical antibodies, as well as several broadly neutralizing HIV antibodies, were also included for comparison. Interestingly, in contrast to many previously described HIV broadly neutralizing antibodies, the vast majority of RSV F-specific antibodies lacked significant polyreactivity in this assay (FIG. 2D).

### RSV F-Specific Antibodies Target Six Major Antigenic Sites

[0202] To map the antigenic specificities of the RSV F-specific antibodies, Applicant first performed competitive binding experiments using a previously described yeast-based assay (44). Antibodies were initially tested for competition with D25, AM14 and MPE8—three previously described preF-specific antibodies (10, 17, 21)—and motavizumab, an affinity-matured variant of palivizumab that binds to both pre- and postF (10, 11, 45). Non-competing antibodies were then tested for competition with a site IV-directed mAb (101F) (46), a site I-directed antibody (Site I Ab), and two high affinity antibodies (High Affinity Ab I and High Affinity Ab 2, respectively) that did not strongly compete with each other or any of the control antibodies. Each antibody was assigned a bin based on the results of this competition assay (see, e.g., Table 4).

[0203] In order to confirm and increase the resolution of our epitope assignments, the binding of each antibody to a panel of preF variants was measured using a luminex-based assay. Each variant contained 2-4 mutations clustered together to form a patch on the surface of preF. A total of nine patches that uniformly covered the surface of preF were generated (FIG. 7A through FIG. 7C). Deglycosylated preF was also included to identify antibodies targeting glycan-dependent epitopes. Binding of each antibody to the 10 preF variants was compared to that of wild-type preF and used to assign a patch (see, e.g., Table 4). Previously characterized antibodies D25, AM14 and motavizumab were used to validate the assay (se, e.g., FIG. 7C and Table 4). The combined bin and patch data were then used to assign each antibody to a single antigenic site (FIG. 3A through FIG. 3G), which were defined based on previously determined structures, resistance mutations, and secondary structure elements of the F protein. Overall, these data show that the large majority of isolated antibodies target six dominant antigenic sites on prefusion RSV F (Ø, I, II, III, IV, and V). Interestingly, only a small proportion of the isolated antibodies had binding profiles similar to that of AM14, suggesting that antibodies targeting this quaternary epitope are not commonly elicited during natural infection. None of the antibodies were sensitive to deglycosylation of F, demonstrating that glycan-dependent antibodies are also rarely elicited by natural RSV infection.

[0204] Analysis of the preF- and postF-binding activities of the antibodies targeting each antigenic site (see, e.g., FIG. 3C through FIG. 3G; Table 4) revealed that three sites are primarily found on preF (Ø, III, and V). Antibodies targeting site 0 and site III have been previously described (10, 17), and these sites are located on the top and side of the preF spike, respectively. Approximately 18% of the antibodies from this donor recognized site 0 and approximately 20% recognized site III. A relatively large proportion of antibodies from this donor (approximately 26%) recognized the third preF-specific site, which has not been previously described and therefore has been designated herein as region site V (See, e.g., FIG. 3C through FIG. 3G; Table 4). The majority of site V antibodies competed with D25, MPE8 and motavizumab, which was unexpected given the distance between the epitopes recognized by these three antibodies. The patch mutant analysis revealed that these antibodies interact with the α3 helix and β3/β4 hairpin of preF. This region is located between the epitopes recognized by D25, MPE8, and motavizumab, explaining the unusual competition profile observed for this class of antibodies (See, e.g., FIG. 8). In addition to the three primarily preF-specific sites, a large number of the antibodies that recognized antigenic site IV were preF-specific, likely due to contacts with β22, which dramatically rearranges during the transition from pre- to postF. In summary, the epitope mapping data show that the large majority of isolated antibodies target six dominant antigenic sites, approximately half of which are exclusively expressed on preF.

### Highly Potent Neutralizing Antibodies Target PreF-Specific Epitopes

[0205] The antibodies were next tested for neutralizing activity against RSV subtypes A and B using a previously described high-throughput neutralization assay (15). Greater than 70% of the isolated antibodies showed neutralizing activity, and approximately 35% -40% neutralized with high potency (IC₅₀≤0.05 μg/ml) (see, e.g., FIG. 4A and FIG. 4B; Table 3). Notably, several clonally unrelated antibodies were ≥5.0-fold more potent than D25 and ≥100-fold more potent than palivizumab (see, e.g., FIG. 4A; Table 3). Interestingly, there was no correlation between neutralization potency and level of SHM, suggesting that extensive SHM is not required for potent neutralization of RSV. Consistent with the binding cross-reactivity data, the majority of neutralizing antibodies showed activity against both subtype A and B (FIG. 4A through FIG. 4C; Table 3).

[0206] The relationship between preF- and postF-binding affinity and neutralization potency was next investigated, which clearly demonstrated that the majority of highly potent antibodies bound preferentially or exclusively to preF (see, e.g., FIG. 4D through FIG. 4G; Table 3). Quantifying this difference revealed that more than 80% of highly potent antibodies (IC₅₀<0.05 μg/ml) were specific for preF (See, e.g., FIG. 9; Table 3) and that the median IC₅₀ for preF-specific antibodies was more than 8-fold lower than for pre- and postF cross-reactive antibodies and 80-fold lower than antibodies that specifically recognized postF (see, e.g., FIG. 4E; Table 3). Importantly, there was a positive correlation between preF binding and neutralization (P<0.001, r=0.24), and the apparent preF K_{D}s generally corresponded well with the neutralization IC₅₀s (see, e.g., FIG. 5A; Table 3). In contrast, there was no correlation between neutralization potency and postF affinity (P=0.44, r=-0.07) (see, e.g., FIG. 5B; Table 3). This result is compatible with the occupancy model of antibody-mediated neutralization (47), and suggests that DS-Cav1 is a faithful antigenic mimic of the native preF trimer. Notably, very few antibodies neutralized with IC₅₀s lower than 100 pM, which is consistent with the previously proposed ceiling to affinity maturation (48, 49).

[0207] The relationship between neutralization potency and antigenic site was next analyzed. The results, provided in, e.g., FIG. 5C, Table 3, and Table 4, collectively, indicated that over 60% of the highly potent neutralizing antibodies targeted antigenic sites Ø and V, which are two of the three prefusion-F specific sites. In contrast, antibodies targeting sites III and IV showed a wide range of neutralization potencies, and antibodies targeting sites I and II were generally moderate to non-neutralizing. Similar results were obtained using binding affinities and neutralization potencies measured for subtype B (See, e.g., FIG. 10A through FIG. 10C; Table 3 and Table 4). Interestingly, a subset of site IV-directed antibodies neutralized with substantially lower potency than would be expected based on preF binding affinity (see, e.g., FIG. 5A; Table 3). This result may suggest that certain epitopes within site IV are less exposed in the context of the native envelope spike expressed on the crowded surface of the virion than on recombinant preF.

### Several Antibodies Cross-Neutralize RSV and HMPV

[0208] Given that the RSV and human metapneumovirus (HMPV) F proteins share 33% amino acid identity, and certain RSV F-specific antibodies cross-neutralize HMPV (17, 50), the antibodies from this donor were tested for neutralizing activity against HMPV. Of the 133 antibodies tested, one neutralized HMPV (see, e.g., Table 5). Sequence analysis revealed that this antibody represents the VH1-46 germline gene and contains a significant degree of somatic hypermutation (See, e.g., Table 2 and sequence listing). This cross-neutralizing antibody bound to both the preF and PostF and competed with MPE8 (See, e.g., Table 5), in agreement with previous studies indicating that MPE8 cross-neutralizes four pneumoviruses, including RSV and HMPV (17). This result suggests, inter alia, that highly conserved epitopes are relatively immunogenic in the context of natural RSV and/or HMPV infection.

### Affinity Maturation of RSV F-Specific Antibodies:

[0209] Some embodiments refer to affinity matured antibodies of any of the antibodies listed in Table 6 (each understood as a “parent” antibody” for producing an affinity matured variant). Affinity matured antibodies may be produced by mutagenesis of any one or more of the CDRs of the parent antibody. According to a specific embodiment, the invention provides for affinity matured variants comprising one or more point mutations e.g., 0, 1, 2, or 3 point mutations in each of the CDR sequences, of any of the antibodies listed in Table 6, or of an antibody comprising the six CDR sequences of any of the antibodies listed in Table 6. Affinity matured variants can be produced by any affinity maturation method employing standard mutagenesis techniques, e.g., for optimizing the binding characteristics, such as increasing affinity of binding, or increasing Kon, or decreasing Koff, and can be characterized by a K_{D} difference of at least 2 fold, 5 fold, 1 log, or 2 logs, or 3 logs, as compared to the parent antibody. Such affinity matured antibodies still have the same binding specificity as the parent antibody and e.g., an optimized affinity of binding the target epitope.

[0210] Selected anti RSV antibodies were identified for affinity maturation. Oligos were ordered which comprised CDRH1, CDRH2, CDRH3, CDRL1, CDRL2, and CDRL3 sequences that were variegated via NNK diversity. The NNK oligos were incorporated into the parent HC or LC via DNA shuffling, as described previously (Stemmer WP et al., DNA shuffling by random fragmentation and reassembly: In vitro recombination for molecular evolution. Proc Natl Acad Sci USA. Oct. 25 1994 ; 91(22):10747-51). The library was then created by transforming the VH and VL PCR products into yeast already containing either the light chain or heavy chain plasmid of the parent. The diversified libraries were then selected using flow cytometry. For each FACS round, the libraries were affinity pressured using decreasing amounts of antigen and clones with improved binding affinities were sorted and propagated. Once improved binding populations were observed by flow cytometry (typically two rounds of selection), single yeast clones were be picked for sequencing and characterization (Table 6).

[0211] A specific embodiment refers to affinity matured variants of the antibody 267 in Table 6. Notably, each of the antibodies numbered 365-372 is an affinity matured variant of the antibody numbered 267 in Table 6.

### Antibody Production and Purification of Affinity Matured Antibodies

[0212] Yeast clones were grown to saturation and then induced for 48 h at 30° C. with shaking. After induction, yeast cells were pelleted and the supernatants were harvested for purification. IgGs were purified using a Protein A column and eluted with acetic acid, pH 2.0. Fab fragments were generated by papain digestion and purified over KappaSelect (GE Healthcare LifeSciences).

### RSV In Vitro Neutralization in ELISA Based Microneutralization Assays

[0213] In vitro RSV neutralization was tested in ELISA based Microneutralization Assays using RSV-A strain A2 (ATCC, VR1540P). Virus (at a final multiplicity of infection of approximately 0.25) was added to 96-well plates containing serially diluted mAbs in serum-free MEM and pre-incubated for 30 min at 4° C. Freshly trypsinized Hep-2 cells (1.5×10 E⁴ cells/well) were then added to each well in MEM supplemented with 5% FCS. Following incubation for 4 days at 37° C. and 5% CO₂, medium was aspirated and cells were washed twice with 200 μl PBS/well, air-dried and fixed with 100 μl Acetone (80%). RSV replication was measured by quantification of expressed viral proteins by ELISA. For this purpose, fixed cells were washed 2× times with PBS-0.1% Tween-20, blocked with 1% skimmed milk in PBS for 1 hour at RT and then stained with a polyclonal goat-anti RSV antibody preparation (BioRad, #7950-0004) for 1 hour at RT in blocking buffer. A donkey anti-goat IgG HRP conjugate was used as detection reagent and 1 step-Ultra TMB (Thermo Fisher Scientific, #34209) as substrate. % inhibition of virus replication was calculated relative to control cells infected with virus in absence of neutralizing antibodies. An isotype matched control mAb was included in all experiments. mAb potency is expressed as half-maximal inhibitory concentration that resulted in 50% reduction in virus replication (IC₅₀). Results are provided in FIG. 11 and demonstrate that all mAbs were able to neutralize RSV-A2 in this setting, with a broad range of IC₅₀ values.

### Discussion

[0214] An in-depth understanding of the human antibody response to RSV infection will aid the development and evaluation of RSV vaccine and therapeutic and/or prophylactic antibody candidates for the treatment and/or prevention of RSV infection. Although previous studies have coarsely mapped the epitopes targeted by RSV-specific neutralizing antibodies in human sera (4, 8), the specificities and functional properties of antibodies induced by natural RSV infection have remained largely undefined. As disclosed herein, preF- and postF-stabilized proteins (11, 15), a high-throughput antibody isolation platform, and a structure-guided collection of prefusion F mutants, were used to clonally dissect the human memory B cell response to RSV F in a naturally infected adult donor, and highly potent and selective RSV-neutralizing—as well as highly potent anti-RSV/anti-HMPV cross-selective and cross-neutralizing—were isolated and characterized.

[0215] In the repertoire analyzed, the ratio of preF-specific antibodies to those that recognize both pre- and postF was slightly greater than 1:1 (See, e.g., FIG. 2B). These values are somewhat lower than those reported for human sera, which showed approximately 70% of anti-F serum binding is specific for preF (8). This discrepancy may be the result of differences between the levels of individual antibodies in serum, differences in the B cell phenotypes achieved for a particular specificity, or variation between donors. Despite these minor differences, the results of both studies suggest that preF-specific epitopes and epitopes shared by pre- and postF are immunogenic during natural RSV infection, whereas the unique surfaces on postF are significantly less immunogenic.

[0216] The repertoire analysis disclosed herein revealed that the large majority of RSV F-specific antibodies target six dominant antigenic sites on prefusion RSV F: Ø, I, II, III, IV, and V. These sites were defined based on previously determined structures, epitope binning/competition assays, resistance mutations, and secondary structure elements of the preF protein. It is important to note that the nomenclature for describing RSV F antigenic sites has evolved over time (6, 51-57), and previous mapping efforts were based on the postfusion conformation of F and did not include surfaces present exclusively on preF. The crystal structure of preF has provided critical information about F structure and function as well as new reagents to map antibody binding sites on the unique surfaces of preF and surfaces shared with postF. To a first approximation, each antibody can be assigned primarily to one of these sites. However, it is likely that antibody epitopes cover the entire surface of F and that there are antibodies that bind two or more adjacent antigenic sites within a protomer and quaternary antibodies that bind across protomers.

[0217] Importantly, the results disclosed herein show that the most potently neutralizing antibodies target antigenic sites Ø and V, both of which are located near the apex of the preF trimer. These findings are consistent with results obtained from human sera mapping, which determined that the majority of neutralizing activity can be removed by pre-incubation with preF (4, 8) and that preF-specific sites other than site Ø make up a considerable fraction of preF-specific neutralizing antibodies (8). Although antigenic site Ø has been shown to be a target of potently neutralizing antibodies (8, 10), the interaction of antibodies with site V is less well understood. Interestingly, it was found that the majority of site V-directed antibodies share several convergent sequence features, suggesting that it may be possible to rapidly detect these types of antibodies in human samples using high-throughput sequencing technology (58). Applicant anticipates this finding to be particularly advantageous in profiling antibody responses to RSV vaccine candidates that aim to preserve the apex of the preF trimer.

[0218] The extensive panel of antibodies described here provides new opportunities for passive prophylaxis, as well as for treatment of RSV infection. A large number of these antibodies neutralize RSV more potently than D25, which serves as the basis for MEDI8897—a monoclonal antibody that is currently in clinical trials for the prevention of RSV in young, at risk children (59). Additionally, a sub-set of these antibodies were demonstrated to cross-neutralize HMPV.

[0219] The development of an effective RSV vaccine has presented a number of unique challenges, and selection of the optimal vaccination strategy will be of the utmost importance. The in-depth analysis of the human antibody response to natural RSV infection presented here provides insights for the development of such a vaccine. Importantly, the results suggest that immunization of pre-immune donors with preF immunogens would be expected to boost neutralizing responses, whereas the use of postF immunogens would likely expand B cell clones with moderate or weak neutralizing activity. Similarly, immunization of RSV naïve infants with preF immunogens would be expected to activate naïve B cells targeting epitopes associated with substantially more potent neutralizing activity compared to postF immunogens. In addition, the ideal RSV vaccine should preserve antigenic sites Ø and V, since these sites are targeted by the most highly potent antibodies elicited in response to natural RSV infection.

[0220] Accordingly, disclosed herein are highly selective and potent anti-RSV antibodies, as well as highly potent cross-neutralizing anti-RSV and anti-HMPV antibodies, as well as vaccine candidates, for the treatment and or prophylaxis of RSV and/or HMPV infection. Additionally, the reagents disclosed here provide a useful set of tools for the evaluation of clinical trials, which will be critical for selecting the optimal RSV vaccination or antibody-based therapeutic strategy from the many currently under investigation (60).

TABLE 1
Antigenic sites targeted by prototypic RSV antibodies

| Antigenic site | Prototypic antibodies |
|---|---|
| Ø | D25, 5C4, AM22 (10, 16) |
| I | 131-2a, 2F |
| II | 1129, palivizumab, motavisumab (6) |
| III | MPE8 (17) |
| IV | 101F (57), mAb 19 (19) |

TABLE 2
Germline usage and sequence information of anti-RSV antibodies

| | | | LC | | | | Number of | Number of |
|---|---|---|---|---|---|---|---|---|
| | Antibody | VH | germline | | | | nucleotide | nucleotide |
| | number | germline | gene | CDR H3 | CDR L3 | Lineage | substitutions | substitutions |
| Name | (Ab #) | gene usage | usage | Sequence | Sequence | number | in VH | in VL |
| ADI- | 232 | VH4-34 | VK1-39 | AGTNYGEV | QQSYS | 4 | 10 | 8 |
| 18875 | | | | NTSNQYFFG | TPLT | | | |
| | | | | MDV | | | | |
| ADI- | 233 | VH4-304 | VK3-20 | ARDVGTLVL | QQYGS | 44 | 12 | 4 |
| 18876 | | | | PTVAYYYG | SPLVT | | | |
| | | | | MDV | | | | |
| ADI- | 234 | VH1-18 | VK2-30 | ARESGATAA | MQAIH | 52 | 9 | 8 |
| 18877 | | | | AMFDY | WPRT | | | |
| ADI- | 235 | VH4-304 | VK3-20 | ARDGGYDH | QQYGA | 23 | 12 | 6 |
| 18878 | | | | VWGTHRYF | SPWT | | | |
| | | | | DK | | | | |
| ADI- | 236 | VH1-18 | VK2-30 | ARDVPGHG | MQGTH | 46 | 9 | 12 |
| 18879 | | | | AAFMDV | WPPA | | | |
| ADI- | 237 | VH1-18 | VK2-30 | ARDPPAYAA | MQGTH | 36 | 8 | 7 |
| 18880 | | | | TLMDV | WPPT | | | |
| ADI- | 238 | VH1-69 | VK3-20 | ARDAYEVW | QQYGS | 21 | 19 | 9 |
| 18882 | | | | TGSYLPPFD | SFLT | | | |
| | | | | Y | | | | |
| ADI- | 239 | VH1-69 | VK1-12 | ARVPESLVA | QQGTS | 79 | 30 | 6 |
| 18883 | | | | SNAYAV | FPFT | | | |
| ADI- | 240 | VH1-3 | VK2-28 | ARGQIVVIP | MQTLQ | 57 | 8 | 1 |
| 18884 | | | | RANFWFDP | TPIT | | | |
| ADI- | 241 | VH4-304 | VK3-20 | ARDGGYDHI | QQYGT | 22 | 13 | 8 |
| 18885 | | | | WGTHRYFA | SPWT | | | |
| | | | | L | | | | |
| ADI- | 242 | VH1-69 | VK1-9 | ARVFFGTCG | QQLHS | 76 | 20 | 8 |
| 18887 | | | | GASCFPSDL | DFQT | | | |
| ADI- | 243 | VH3-33 | VK3-20 | ARDHASTPY | QQYGS | 24 | 8 | 10 |
| 18888 | | | | YMDV | FPWT | | | |
| ADI- | 244 | VH4-34 | VK1-39 | AGTNVGFV | QQSYS | 3 | 25 | 12 |
| 18889 | | | | NTHYYFGM | VPLT | | | |
| | | | | DV | | | | |
| ADI- | 245 | VH1-69 | VK3-20 | ARDAYEVW | QQYGS | 21 | 27 | 10 |
| 18890 | | | | TGSYLPPFD | SFLT | | | |
| | | | | Y | | | | |
| ADI- | 246 | VH1-69 | VK3-20 | ARDAYEVW | QQYGS | 21 | 22 | 10 |
| 18891 | | | | TGSYLPPFD | SFLT | | | |
| | | | | Y | | | | |
| ADI- | 247 | VH1-18 | VK2-30 | ARDSFSLTG | MQATQ | 39 | 7 | 1 |
| 18892 | | | | AGFPDY | WPRT | | | |
| ADI- | 248 | VH3-21 | VL1-40 | ARLGYGGN | QSYDL | 61 | 8 | 3 |
| 18893 | | | | PELDY | SLSSSR | | | |
| | | | | | V | | | |
| ADI- | 249 | VH3-30 | VL1-40 | ARGASYYY | QSYDS | 54 | 11 | 5 |
| 18894 | | | | VSSDLGY | LSASW | | | |
| | | | | | V | | | |
| ADI- | 250 | VH5-51 | VK1-33 | ASVMLRGIM | QPYDN | 84 | 12 | 1 |
| 18895 | | | | | LPPPLT | | | |
| ADI- | 251 | VH3-30 | VK3-15 | ARAPYDIWS | QQYSI | 16 | 10 | 6 |
| 18896 | | | | GYCLDY | WPQT | | | |
| ADI- | 252 | VH3-7 | VK4-1 | ARDTPDVLR | QQYYS | 42 | 11 | 8 |
| 18897 | | | | HLEWPPVG | SPQT | | | |
| | | | | AFDI | | | | |
| ADI- | 253 | VH1-18 | VK2-30 | ARESGATAA | MQAIH | 52 | 9 | 8 |
| 18898 | | | | AMFDY | WPRT | | | |
| ADI- | 254 | VH3-30 | VK3-15 | ARAPYDIWS | QQYSI | 16 | 10 | 6 |
| 18899 | | | | GYCLDY | WPQT | | | |
| ADI- | 255 | VH3-23 | VK1-5 | ARDQEVELI | QQYYT | 38 | 22 | 7 |
| 18900 | | | | DDAFDF | YYS | | | |
| ADI- | 256 | VH1-2 | VL1-51 | ARSSLVGAS | GTWDA | 72 | 18 | 8 |
| 18901 | | | | PNFDF | SLSAA | | | |
| | | | | | MV | | | |
| ADI- | 257 | VH4-59 | VL3-21 | ARSTWDYG | QVWDS | 73 | 8 | 7 |
| 18902 | | | | DHFPFDY | SPDHPY | | | |
| | | | | | V | | | |
| ADI- | 258 | VH1-18 | VK2-30 | ARDVPGHG | MQGTH | 46 | 9 | 12 |
| 18903 | | | | AAFMDV | WPPA | | | |
| ADI- | 259 | VH1-18 | VK2-30 | ARDPPAYAA | MQGTH | 36 | 8 | 7 |
| 18904 | | | | TLMDV | WPPT | | | |
| ADI- | 260 | VH4-39 | VK1-5 | ACKRADAD | QQYHV | 1 | 29 | 2 |
| 18905 | | | | DVDYVAGL | YFPLT | | | |
| | | | | TGFPWYFDV | | | | |
| ADI- | 261 | VH3-33 | VK3-20 | ARDHASTPY | QQYGS | 24 | 8 | 10 |
| 18906 | | | | YMDV | FPWT | | | |
| ADI- | 262 | VH1-69 | VK3-11 | ARGCCGAV | QQRTT | 55 | 21 | 7 |
| 18907 | | | | AGFQH | GVT | | | |
| ADI- | 263 | VH3-21 | VL1-40 | VRGVLPGGT | QSYDY | 98 | 16 | 7 |
| 18908 | | | | GGGWFDS | SLNWV | | | |
| ADI- | 264 | VH4-304 | VK3-20 | ARDLGKPL | QVYSSS | 27 | 13 | 9 |
| 18909 | | | | WDGHYYYG | PPIT | | | |
| | | | | VDV | | | | |
| ADI- | 265 | VH1-69 | VK2-28 | ARTAALGPP | MQTLQ | 74 | 8 | 3 |
| 18910 | | | | GTIVGYMD | TPWT | | | |
| | | | | V | | | | |
| ADI- | 266 | VH5-51 | VK1-33 | ARLGIGAAA | LQFDN | 60 | 12 | 7 |
| 18911 | | | | RNY | LPPT | | | |
| ADI- | 267 | VH3-21 | VL1-40 | ARDLLPVER | QSYDS | 31 | 6 | 3 |
| 18912 | | | | GPAFDI | RLGGS | | | |
| | | | | | V | | | |
| ADI- | 268 | VH5-51 | VK1-39 | ARQIGGLVC | QQSDT | 67 | 13 | 6 |
| 18913 | | | | SSESCYFYG | TPFT | | | |
| | | | | MDV | | | | |
| ADI- | 269 | VH3-15 | VL1-40 | ATDSRRLYD | QSYDD | 86 | 4 | 3 |
| 18915 | | | | SRGFYSSAF | SLTGW | | | |
| | | | | DV | V | | | |
| ADI- | 270 | VH5-51 | VK1-39 | ARQIGGLVC | QQSDT | 67 | 13 | 6 |
| 18916 | | | | SSESCYFYG | TPFT | | | |
| | | | | MDV | | | | |
| ADI- | 271 | VH3-21 | VL1-40 | VRGVLPGDT | QSYDY | 98 | 16 | 7 |
| 18917 | | | | GGGWFDS | SLNWV | | | |
| ADI- | 272 | VH5-51 | VK3-15 | ARLPVGSYY | QQYNN | 62 | 8 | 13 |
| 18918 | | | | YFNL | WLSWT | | | |
| ADI- | 273 | VH4-31 | VK2-28 | ARTSYAGR | MQGLQ | 75 | 22 | 4 |
| 18919 | | | | MLDR | IPWT | | | |
| ADI- | 274 | VH3-30 | VL1-51 | AKVRNEAW | GTWDT | 12 | 10 | 14 |
| 18920 | | | | ELLGDALDV | SLRAG | | | |
| | | | | | V | | | |
| ADI- | 275 | VH1-24 | VK1-39 | ATPTPVGAT | QQSYII | 88 | 15 | 2 |
| 18921 | | | | DY | PYT | | | |
| ADI- | 276 | VH4-b | VK3-15 | ASRRGSGWF | QQYNN | 83 | 22 | 8 |
| 18922 | | | | FDS | WPPGG | | | |
| | | | | | T | | | |
| ADI- | 277 | VH3-21 | VL1-40 | ARDWPNSSS | QSYDSS | 48 | 0 | 0 |
| 18923 | | | | SPNWFDP | LSGFY | | | |
| | | | | | V | | | |
| ADI- | 278 | VH5-51 | VL1-40 | ARCSLSCDY | QSYDSS | 18 | 9 | 11 |
| 18924 | | | | YGVNL | LSGFY | | | |
| | | | | | V | | | |
| ADI- | 279 | VH3-30 | VK3-11 | AKPIVGPTT | QQRSN | 9 | 8 | 0 |
| 18925 | | | | GYFDY | WYT | | | |
| ADI- | 280 | VH1-18 | VK2-30 | ARDPPASAA | MQGTH | 36 | 19 | 8 |
| 18926 | | | | AMLDY | GRGIS | | | |
| ADI- | 281 | VH1-2 | VK1-13 | ASQSSPYTP | QQSFTP | 82 | 21 | 21 |
| 18927 | | | | GALDV | QFT | | | |
| ADI- | 282 | VH1-69 | VL7-46 | ARDIEWFVL | LLSYSG | 25 | 15 | 8 |
| 18928 | | | | MDPITSYYP | ARPV | | | |
| | | | | MDV | | | | |
| ADI- | 283 | VH3-11 | VL1-44 | ARDAVIVVG | AAWDD | 19 | 9 | 6 |
| 18929 | | | | PVAVHYQY | SLNGP | | | |
| | | | | YADV | V | | | |
| ADI- | 284 | VH1-69 | VK3-20 | ARDAYEVW | QQYGS | 21 | 14 | 8 |
| 18930 | | | | TGSYLPPFD | SFLT | | | |
| | | | | Y | | | | |
| ADI- | 285 | VH3-49 | VK3-15 | TRDDILTGF | QQYDN | 92 | 6 | 6 |
| 18931 | | | | YDRSYYYGI | WPPYT | | | |
| | | | | HV | | | | |
| ADI- | 286 | VH4-304 | VK3-11 | ARDLGTLAF | QQRST | 29 | 25 | 10 |
| 18932 | | | | DPYYYYGID | WPT | | | |
| | | | | V | | | | |
| ADI- | 287 | VH1-46 | VK1-39 | ARRGYPDSG | QQSYIR | 69 | 26 | 10 |
| 18933 | | | | SYPLDY | PIT | | | |
| ADI- | 288 | VH4-304 | VK3-11 | ARDLGYSSS | QQRSN | 30 | 19 | 6 |
| 18935 | | | | SPAFYYGID | GVLT | | | |
| | | | | F | | | | |
| ADI- | 289 | VH1-8 | VK1-39 | ASQSSPYTP | QLNSG | 82 | 26 | 12 |
| 18936 | | | | GAMGV | ALFT | | | |
| ADI- | 290 | VH4-304 | VK3-20 | ARDVGVYS | QQYGG | 45 | 25 | 10 |
| 18937 | | | | GYDVFHYY | SPPVT | | | |
| | | | | GMDV | | | | |
| ADI- | 291 | VH3-74 | VK1-5 | ARDLWTTSP | QQYNS | 32 | 15 | 10 |
| 18938 | | | | YFDL | WA | | | |
| ADI- | 292 | VH4-34 | VK1-39 | AGTNYGEV | QQSYS | 4 | 3 | 7 |
| 18939 | | | | NTSNQYFFG | APLT | | | |
| | | | | MDV | | | | |
| ADI- | 293 | VH1-8 | VK1-39 | ASQSSPYTP | QLNSG | 82 | 33 | 14 |
| 18940 | | | | GAMDV | ALFT | | | |
| ADI- | 294 | VH5-51 | VK3-15 | GQAVAGGE | QHYNN | 90 | 7 | 5 |
| 18941 | | | | YFHH | WPRG | | | |
| ADI- | 295 | VH4-304 | VK3-11 | ARDLGTAN | QQRSN | 28 | 19 | 6 |
| 18942 | | | | NYYFGMDV | WPPYT | | | |
| ADI- | 296 | VH4-b | VK3-20 | AGAFWEVW | QQYSSS | 2 | 38 | 7 |
| 18943 | | | | TGLYSPPFD | PLT | | | |
| | | | | F | | | | |
| ADI- | 297 | VH1-18 | VK2-30 | ARDPAVDAI | MQGTH | 34 | 20 | 8 |
| 18944 | | | | PMLDY | WPLT | | | |
| ADI- | 298 | VH3-30 | VL2-14 | AKEEWLVP | SSYSTN | 7 | 8 | 3 |
| 18946 | | | | AY | SAP | | | |
| ADI- | 299 | VH3-30 | VK3-15 | ARAPYDIWS | QQYSI | 16 | 16 | 7 |
| 18947 | | | | GYCLDY | WPQT | | | |
| ADI- | 300 | VH3-30 | VK3-15 | ARAPYDIWS | QQYSI | 16 | 13 | 7 |
| 18948 | | | | GYCLDY | WPQT | | | |
| ADI- | 301 | VH1-18 | VK2-30 | ARDPAVDAI | MQGTH | 34 | 20 | 8 |
| 18949 | | | | PMLDY | WPLT | | | |
| ADI- | 302 | VH4-39 | VK3-11 | ATAWTFDH | QLRGH | 85 | 13 | 2 |
| 18950 | | | | | WPPTIT | | | |
| ADI- | 303 | VH3-23 | VL2-14 | AKDGLRDV | SSYRN | 5 | 19 | 16 |
| 18951 | | | | SRVYYIDV | GNALG | | | |
| | | | | | V | | | |
| ADI- | 304 | VH3-23 | VL2-14 | AKDGLRDLS | SSYRN | 5 | 18 | 11 |
| 18952 | | | | RVYYIDV | GNTLG | | | |
| | | | | | V | | | |
| ADI- | 305 | VH1-69 | VK3-20 | ARDAYEVW | QQYGS | 21 | 12 | 11 |
| 18953 | | | | TGSYLPPFD | SFLT | | | |
| | | | | Y | | | | |
| ADI- | 306 | VH3-30 | VK3-15 | ARAPYDIWS | QQYSI | 16 | 11 | 6 |
| 18955 | | | | GYCLDY | WPQT | | | |
| ADI- | 307 | VH1-69 | VL2-11 | ATRLYTLGS | CSYAG | 89 | 23 | 10 |
| 18956 | | | | PFDN | RYIYV | | | |
| ADI- | 308 | VH3-21 | VL1-40 | ARVHVDLV | QSYDSS | 78 | 12 | 3 |
| 18957 | | | | TTIFGVDFDF | LSGAI | | | |
| ADI- | 309 | VH1-18 | VK2-30 | AREPPSDDA | MQGTQ | 51 | 18 | 3 |
| 18958 | | | | ARLFDY | WPVT | | | |
| ADI- | 310 | VH1-24 | VK1-39 | ATPTPVGAT | QQTYII | 88 | 18 | 4 |
| 18959 | | | | DF | PYT | | | |
| ADI- | 311 | VH4-39 | VL3-21 | AREGPNWE | QVWDT | 50 | 15 | 5 |
| 18960 | | | | LLNAFDI | SSDHV | | | |
| | | | | | N | | | |
| ADI- | 312 | VH3-21 | VL1-40 | ARVSTELGY | QSYDSS | 80 | 1 | 0 |
| 18962 | | | | YYMDV | LSVV | | | |
| ADI- | 313 | VH1-3 | VK4-1 | GRDWDGAI | QQYYG | 91 | 14 | 9 |
| 18965 | | | | RVLDY | NFPT | | | |
| ADI- | 314 | VH3-30 | VK2-30 | ARDPGVGSY | MQGTH | 35 | 13 | 3 |
| 18966 | | | | YNVVGMDV | WPPT | | | |
| ADI- | 315 | VH1-24 | VK1-39 | ATPLPAGAL | QQTYII | 88 | 23 | 12 |
| 18967 | | | | DK | PYT | | | |
| ADI- | 316 | VH4-304 | VK3-11 | TRDLGYSTS | QQRTN | 93 | 17 | 8 |
| 18968 | | | | SPSFYYGMD | WPIT | | | |
| | | | | V | | | | |
| ADI- | 317 | VH1-18 | VK2-30 | ARDVFSKTA | MQATD | 43 | 15 | 4 |
| 18969 | | | | ARIFDY | WPVT | | | |
| ADI- | 318 | VH4-304 | VK3-11 | ARDIGYGDH | QQRTN | 26 | 6 | 9 |
| 18970 | | | | GTGSYYYGI | WIT | | | |
| | | | | ED | | | | |
| ADI- | 319 | VH3-23 | VL3-21 | AKDRVGWF | QVWDS | 6 | 17 | 12 |
| 18971 | | | | GEFDAFDF | RSEHVI | | | |
| ADI- | 320 | VH1-18 | VK2-30 | ARDPAVDAI | MQGTH | 34 | 20 | 8 |
| 18972 | | | | PMLDY | WPLT | | | |
| ADI- | 321 | VH2-70 | VK3-20 | ALMRPFWS | QLYHR | 13 | 18 | 14 |
| 18973 | | | | RDDYYYSIA | SPGSAS | | | |
| | | | | V | QTVWT | | | |
| ADI- | 322 | VH1-18 | VK2-30 | ARDTPATAA | MQGIF | 41 | 22 | 5 |
| 18974 | | | | PLLDY | RPGT | | | |
| ADI- | 323 | VH1-18 | VK2-24 | ARDSGCCSG | MQATE | 40 | 11 | 3 |
| 18975 | | | | STSDV | FPPMY | | | |
| | | | | | T | | | |
| ADI- | 324 | VH4-31 | VK1-39 | ARDNKHHD | QQSYT | 33 | 5 | 9 |
| 18976 | | | | SGNYYAYF | TRLT | | | |
| | | | | DH | | | | |
| ADI- | 325 | VH1-3 | VK1-33 | ARQVSTSG | QQYDN | 68 | 17 | 6 |
| 18977 | | | | WHATSHRF | LPLT | | | |
| | | | | AP | | | | |
| ADI- | 326 | VH3-30 | VK1-5 | AKSSSSHVN | QQYYN | 11 | 9 | 11 |
| 18978 | | | | SRQDK | WWT | | | |
| ADI- | 327 | VH1-18 | VK2-30 | ARDSFSETG | MQATH | 39 | 11 | 1 |
| 18979 | | | | TGFPDF | RPRT | | | |
| ADI- | 328 | VH5-51 | VK3-11 | AKSNVGNT | QEVRN | 10 | 8 | 9 |
| 18980 | | | | GWNY | WPPCT | | | |
| ADI- | 329 | VH4-30 | VK3-20 | ARCGNEYG | QQYGS | 17 | 27 | 9 |
| 18981 | | | | EVHPFDI | SPWT | | | |
| ADI- | 330 | VH1-18 | VK2-30 | ARDSFSETG | MQATH | 39 | 7 | 1 |
| 18982 | | | | TGFPDF | RPRT | | | |
| ADI- | 331 | VH3-30 | VK1-17 | AREAYEEW | LQHNR | 49 | 14 | 5 |
| 18983 | | | | ELTMGNLD | YPFT | | | |
| | | | | H | | | | |
| ADI- | 332 | VH4-61 | VK1-12 | ARGEHFAY | QQANS | 56 | 29 | 5 |
| 18984 | | | | WWGN | FPRT | | | |
| ADI- | 333 | VH1-2 | VK1-39 | TSQTSPYTP | QQTYN | 95 | 22 | 16 |
| 18985 | | | | GAMGV | GLIA | | | |
| ADI- | 334 | VH3-30 | VL1-40 | ARGASYYY | QSYDS | 54 | 12 | 5 |
| 18986 | | | | VSSDLGY | LSASW | | | |
| | | | | | V | | | |
| ADI- | 335 | VH1-69 | VK3-20 | ARDAYEVW | QQYGS | 20 | 12 | 8 |
| 18987 | | | | TGSYLPPFD | SFLT | | | |
| | | | | D | | | | |
| ADI- | 336 | VH3-21 | VL1-40 | VREAYASSS | QSYDSS | 97 | 22 | 6 |
| 18988 | | | | ALYWFDP | LSGWV | | | |
| ADI- | 337 | VH3-48 | VK2-28 | ARSLGSGNY | MQALQ | 71 | 14 | 6 |
| 18989 | | | | DNEDQTFYY | TPYT | | | |
| | | | | YYGMDV | | | | |
| ADI- | 338 | VH4-304 | VK3-11 | ARDLGTAN | QQRSN | 28 | 19 | 6 |
| 18990 | | | | NYYFGMDV | WPPYT | | | |
| ADI- | 339 | VH4-304 | VL3-21 | ASGPVGMA | QVWDS | 81 | 22 | 14 |
| 18991 | | | | TSNWFDP | STDYH | | | |
| | | | | | VV | | | |
| ADI- | 340 | VH1-46 | VL1-40 | ARAPSHDE | QSYDSS | 15 | 14 | 7 |
| 18992 | | | | WVAISRNVV | LSAWV | | | |
| | | | | GFDA | | | | |
| ADI- | 341 | VH3-21 | VL1-40 | AREVLPATA | QSYDIS | 53 | 10 | 7 |
| 18993 | | | | IGGAWLDP | LSASY | | | |
| | | | | | V | | | |
| ADI- | 342 | VH1-18 | VL2-23 | ARIGHVTAV | CSYVA | 58 | 13 | 7 |
| 18994 | | | | AGAPPDY | GSTSV | | | |
| ADI- | 343 | VH4-304 | VL3-21 | ASGPVGMA | QVWDS | 81 | 18 | 12 |
| 18995 | | | | TSNWFDP | GTDYH | | | |
| | | | | | VV | | | |
| ADI- | 344 | VH1-2 | VL1-51 | ARSSLVGAS | GTWDA | 72 | 17 | 10 |
| 18996 | | | | PNFDF | SLSAA | | | |
| | | | | | MV | | | |
| ADI- | 345 | VH4-34 | VK3-15 | ARVHPSYDF | QQYAY | 77 | 16 | 9 |
| 18997 | | | | GWRFFDF | WPPYT | | | |
| ADI- | 346 | VH4-304 | VL3-21 | ASGPVGMA | QVWDS | 81 | 15 | 15 |
| 18998 | | | | TSNWFDP | STDHH | | | |
| | | | | | VV | | | |
| ADI- | 347 | VH1-69 | VL2-11 | ARPNYDILT | CSYAG | 65 | 13 | 3 |
| 18999 | | | | GYAFDI | GLYV | | | |
| ADI- | 348 | VH1-8 | VL1-36 | VQMDHCRS | AAWDD | 96 | 10 | 6 |
| 19000 | | | | TSCSEGNWF | SLNVW | | | |
| | | | | DT | V | | | |
| ADI- | 349 | VH3-49 | VL2-8 | TRQDDFWS | SSYAGS | 94 | 10 | 7 |
| 19001 | | | | GHPYYFEY | NDLGV | | | |
| ADI- | 350 | VH4-59 | VK1-39 | ARQFGYDK | QQSYSI | 66 | 17 | 8 |
| 19002 | | | | NTLSRLDFD | PWT | | | |
| | | | | Y | | | | |
| ADI- | 351 | VH4-39 | VL3-21 | AREGPNWE | QVWDT | 50 | 15 | 4 |
| 19003 | | | | LLNAFDI | SSDHV | | | |
| | | | | | V | | | |
| ADI- | 352 | VH1-18 | VK2-30 | ARDPPASAA | MQGTH | 36 | 19 | 7 |
| 19004 | | | | AMLDY | GRGIS | | | |
| ADI- | 353 | VH1-18 | VK1-39 | ASQSSPYTP | QLNSG | 82 | 21 | 9 |
| 19005 | | | | GAMGV | ALFT | | | |
| ADI- | 354 | VH3-11 | VK3-20 | ARAKTSYYF | QRYGN | 14 | 30 | 12 |
| 19006 | | | | YALDV | SWP | | | |
| ADI- | 355 | VH3-23 | VK4-1 | AKESLDFGS | HQYYD | 8 | 18 | 5 |
| 19007 | | | | GSYNWFDT | THT | | | |
| ADI- | 356 | VH3-30 | VK3-11 | ARDPSLGYN | QQRSN | 37 | 15 | 6 |
| 19008 | | | | NHYFDY | WPPMY | | | |
| | | | | | S | | | |
| ADI- | 357 | VH1-69 | VK3-20 | ARDAYEVW | QQYGS | 21 | 19 | 6 |
| 19009 | | | | TGSYLPPFD | SFLT | | | |
| | | | | Y | | | | |
| ADI- | 358 | VH3-21 | VL1-40 | ARDVQYSG | QSYDSS | 47 | 0 | 0 |
| 19010 | | | | YDSGYYFD | LSALY | | | |
| | | | | Y | V | | | |
| ADI- | 359 | VH3-30 | VL4-60 | ATIRGIVAG | EAWDF | 87 | 19 | 9 |
| 19011 | | | | LCDN | NTGGV | | | |
| ADI- | 360 | VH4-4 | VK1-39 | ARLSGNCSG | QQSYN | 63 | 12 | 10 |
| 19012 | | | | GSCYSPFDH | TVYT | | | |
| ADI- | 361 | VH5-51 | VK1-12 | ARPMTTQEG | QQTNS | 64 | 4 | 2 |
| 19013 | | | | FDL | FLPLT | | | |
| ADI- | 362 | VH4-304 | VK3-20 | ARSADIDIV | QQYGT | 70 | 21 | 10 |
| 19014 | | | | WGSSLYMP | SPWT | | | |
| | | | | L | | | | |
| ADI- | 363 | VH3-21 | VL1-40 | ARIGYSSAH | QSYDK | 59 | 13 | 5 |
| 19016 | | | | HYQYYMDV | SLSGG | | | |
| | | | | | YC | | | |
| ADI- | 364 | VH1-18 | VL3-25 | ASQSSPYTP | QSADSS | 82 | 22 | 0 |
| 19017 | | | | GAMGV | GTYPV | | | |
| | | | | | V | | | |

TABLE 3
Affinity and Neutralization data for anti-RSV antibodies

| | | | | | | Neut IC₅₀ | |
|---|---|---|---|---|---|---|---|
| | Antibody | Prefusion | Postfusion | Prefusion | Postfusion | (μg/ml) | Neut IC₅₀ |
| | number | subtype A K_{D} | subtype A K_{D} | subtype B K_{D} | subtype B K_{D} | subtype | (μg/ml) |
| Name | (Ab #) | (M)* | (M)* | (M)* | (M)* | A* | subtype B* |
| ADI- | 232 | 7.36E−10 | NB | 7.64E−10 | NB | 0.040 | 0.035 |
| 18875 | | | | | | | |
| ADI- | 233 | 7.07E−10 | 1.71E−09 | 3.16E−10 | 1.79E−10 | 0.037 | 0.179 |
| 18876 | | | | | | | |
| ADI- | 234 | 3.03E−10 | NB | 3.83E−10 | NB | 0.410 | 0.130 |
| 18877 | | | | | | | |
| ADI- | 235 | 4.53E−09 | 4.83E−10 | 5.82E−09 | 3.88E−10 | >10 | 8.308 |
| 18878 | | | | | | | |
| ADI- | 236 | 3.12E−10 | NB | 3.58E−10 | NB | 0.041 | 0.103 |
| 18879 | | | | | | | |
| ADI- | 237 | 2.55E−10 | NB | 3.04E−10 | NB | 0.041 | 0.055 |
| 18880 | | | | | | | |
| ADI- | 238 | 4.27E−10 | NB | 4.76E−10 | NB | 0.041 | 0.057 |
| 18882 | | | | | | | |
| ADI- | 239 | 4.31E−10 | NB | 5.66E−10 | NB | 0.041 | 0.050 |
| 18883 | | | | | | | |
| ADI- | 240 | 3.38E−10 | NB | 2.04E−10 | NB | 0.073 | 0.239 |
| 18884 | | | | | | | |
| ADI- | 241 | 2.18E−09 | 3.84E−10 | 3.89E−09 | 3.07E−10 | 0.376 | 8.635 |
| 18885 | | | | | | | |
| ADI- | 242 | NB | 7.43E−10 | 1.22E−08 | 5.49E−10 | 1.110 | >10 |
| 18887 | | | | | | | |
| ADI- | 243 | NB | 2.54E−08 | NB | 1.16E−09 | >10 | >10 |
| 18888 | | | | | | | |
| ADI- | 244 | 5.54E−10 | NB | 5.87E−10 | NB | 0.040 | 0.019 |
| 18889 | | | | | | | |
| ADI- | 245 | 4.89E−10 | NB | 4.58E−10 | NB | 0.041 | 0.041 |
| 18890 | | | | | | | |
| ADI- | 246 | 5.34E−10 | NB | 5.13E−10 | NB | 0.012 | 0.026 |
| 18891 | | | | | | | |
| ADI- | 247 | 2.17E−10 | NB | 2.53E−10 | NB | 0.018 | 0.117 |
| 18892 | | | | | | | |
| ADI- | 248 | 2.45E−10 | NB | 2.78E−10 | NB | 0.123 | 0.182 |
| 18893 | | | | | | | |
| ADI- | 249 | 2.54E−09 | NB | 3.27E−10 | NB | 0.345 | 0.123 |
| 18894 | | | | | | | |
| ADI- | 250 | NB | 2.37E−09 | NB | 4.86E−10 | 2.303 | >10 |
| 18895 | | | | | | | |
| ADI- | 251 | 2.27E−09 | 2.79E−10 | 1.81E−09 | 2.70E−10 | 1.100 | 4.722 |
| 18896 | | | | | | | |
| ADI- | 252 | 1.47E−09 | 2.19E−10 | 1.53E−09 | 1.85E−10 | 0.288 | 0.762 |
| 18897 | | | | | | | |
| ADI- | 253 | 3.05E−10 | NB | 3.25E−10 | NB | 0.030 | 0.097 |
| 18898 | | | | | | | |
| ADI- | 254 | 1.92E−09 | 2.66E−10 | 1.59E−09 | 2.51E−10 | 0.742 | 2.700 |
| 18899 | | | | | | | |
| ADI- | 255 | 1.19E−09 | NB | 3.31E−10 | NB | 0.035 | 0.059 |
| 18900 | | | | | | | |
| ADI- | 256 | 2.17E−09 | NB | NB | NB | 5.646 | 5.762 |
| 18901 | | | | | | | |
| ADI- | 257 | 1.07E−10 | NB | 1.01E−10 | NB | 0.024 | 0.150 |
| 18902 | | | | | | | |
| ADI- | 258 | 3.24E−10 | NB | 2.72E−10 | NB | 0.036 | 0.118 |
| 18903 | | | | | | | |
| ADI- | 259 | 2.51E−10 | NB | 2.37E−10 | NB | 0.018 | 0.089 |
| 18904 | | | | | | | |
| ADI- | 260 | 3.38E−09 | NB | NB | NB | 0.685 | 3.676 |
| 18905 | | | | | | | |
| ADI- | 261 | NB | 2.33E−08 | NB | 1.10E−09 | >10 | >10 |
| 18906 | | | | | | | |
| ADI- | 262 | 1.74E−10 | NB | 2.04E−10 | NB | 3.300 | >10 |
| 18907 | | | | | | | |
| ADI- | 263 | 3.02E−10 | NB | 3.52E−10 | NB | 0.018 | 0.095 |
| 18908 | | | | | | | |
| ADI- | 264 | 5.08E−10 | 5.81E−10 | 2.88E−10 | 2.25E−10 | 0.110 | 0.169 |
| 18909 | | | | | | | |
| ADI- | 265 | 4.67E−09 | NB | 1.06E−08 | NB | >10 | 0.767 |
| 18910 | | | | | | | |
| ADI- | 266 | NB | 3.53E−10 | NB | 2.80E−10 | 0.301 | 4.853 |
| 18911 | | | | | | | |
| ADI- | 267 | 2.58E−10 | NB | 2.86E−10 | NB | 0.024 | 0.061 |
| 18912 | | | | | | | |
| ADI- | 268 | 5.68E−10 | NB | 4.71E−10 | NB | <0.01 | <0.01 |
| 18913 | | | | | | | |
| ADI- | 269 | 2.81E−08 | NB | 4.21E−10 | NB | 1.199 | 0.021 |
| 18915 | | | | | | | |
| ADI- | 270 | 5.85E−10 | NB | 4.65E−10 | NB | <0.01 | <0.01 |
| 18916 | | | | | | | |
| ADI- | 271 | 3.56E−10 | NB | 3.32E−10 | NB | 0.024 | 0.091 |
| 18917 | | | | | | | |
| ADI- | 272 | NB | 5.67E−10 | NB | 4.09E−10 | 0.377 | 4.590 |
| 18918 | | | | | | | |
| ADI- | 273 | 2.02E−10 | NB | 1.63E−10 | NB | 0.123 | 0.261 |
| 18919 | | | | | | | |
| ADI- | 274 | 6.78E−10 | NB | 9.77E−11 | NB | 0.041 | 0.049 |
| 18920 | | | | | | | |
| ADI- | 275 | 5.75E−09 | NB | NB | NB | 1.703 | 1.172 |
| 18921 | | | | | | | |
| ADI- | 276 | 3.47E−09 | 3.22E−10 | 5.27E−09 | 2.87E−10 | >10 | 5.051 |
| 18922 | | | | | | | |
| ADI- | 277 | 5.17E−10 | NB | 1.79E−09 | NB | 0.078 | 0.147 |
| 18923 | | | | | | | |
| ADI- | 278 | 6.48E−09 | 4.11E−10 | NB | 3.21E−10 | 0.572 | 1.073 |
| 18924 | | | | | | | |
| ADI- | 279 | 4.99E−09 | NB | NB | NB | >10 | >10 |
| 18925 | | | | | | | |
| ADI- | 280 | 2.52E−10 | NB | 2.50E−10 | NB | 0.023 | 0.092 |
| 18926 | | | | | | | |
| ADI- | 281 | 3.58E−09 | NB | 2.99E−09 | NB | 0.022 | 0.067 |
| 18927 | | | | | | | |
| ADI- | 282 | 4.49E−10 | NB | 5.15E−10 | NB | 0.034 | 0.062 |
| 18928 | | | | | | | |
| ADI- | 283 | 1.61E−09 | NB | NB | NB | 0.261 | 0.369 |
| 18929 | | | | | | | |
| ADI- | 284 | 3.87E−10 | NB | 3.72E−10 | NB | 0.013 | 0.051 |
| 18930 | | | | | | | |
| ADI- | 285 | 5.65E−10 | NB | 4.88E−10 | NB | >10 | >10 |
| 18931 | | | | | | | |
| ADI- | 286 | 9.17E−10 | NB | 1.39E−09 | NB | 0.184 | 0.351 |
| 18932 | | | | | | | |
| ADI- | 287 | NB | 2.00E−08 | NB | 6.16E−10 | 0.075 | 0.137 |
| 18933 | | | | | | | |
| ADI- | 288 | 6.60E−10 | NB | 5.82E−10 | NB | 0.779 | 0.355 |
| 18935 | | | | | | | |
| ADI- | 289 | 3.03E−10 | NB | 2.98E−10 | NB | 0.032 | 0.035 |
| 18936 | | | | | | | |
| ADI- | 290 | 2.89E−10 | NB | 2.73E−10 | NB | 0.084 | 0.508 |
| 18937 | | | | | | | |
| ADI- | 291 | 1.65E−10 | 2.16E−10 | 1.50E−10 | 1.68E−10 | 0.837 | 4.255 |
| 18938 | | | | | | | |
| ADI- | 292 | 5.74E−10 | NB | 5.60E−10 | NB | 0.018 | 0.038 |
| 18939 | | | | | | | |
| ADI- | 293 | 1.12E−09 | NB | 1.56E−09 | NB | 0.023 | 0.063 |
| 18940 | | | | | | | |
| ADI- | 294 | NB | 1.91E−08 | NB | 6.45E−10 | >10 | >10 |
| 18941 | | | | | | | |
| ADI- | 295 | 8.65E−10 | 2.81E−10 | 5.12E−10 | 2.58E−10 | 0.374 | 0.614 |
| 18942 | | | | | | | |
| ADI- | 296 | 6.46E−10 | NB | 7.25E−10 | NB | 0.027 | 0.043 |
| 18943 | | | | | | | |
| ADI- | 297 | 3.09E−10 | NB | 3.37E−10 | NB | 0.026 | 0.074 |
| 18944 | | | | | | | |
| ADI- | 298 | 1.58E−10 | 2.06E−10 | 1.57E−10 | 1.66E−10 | 0.093 | 0.227 |
| 18946 | | | | | | | |
| ADI- | 299 | 2.45E−09 | 2.96E−10 | 2.20E−09 | 2.82E−10 | 1.299 | 3.602 |
| 18947 | | | | | | | |
| ADI- | 300 | 4.55E−09 | 2.57E−10 | 2.10E−09 | 2.47E−10 | 1.123 | 4.346 |
| 18948 | | | | | | | |
| ADI- | 301 | 3.07E−10 | NB | 3.08E−10 | NB | 0.040 | 0.076 |
| 18949 | | | | | | | |
| ADI- | 302 | 1.13E−09 | 3.93E−10 | 4.18E−09 | 3.85E−10 | >10 | >10 |
| 18950 | | | | | | | |
| ADI- | 303 | 7.52E−10 | 1.29E−09 | 5.35E−09 | 1.13E−09 | 3.398 | >10 |
| 18951 | | | | | | | |
| ADI- | 304 | 7.15E−10 | 7.29E−10 | 1.01E−09 | 6.33E−10 | 1.589 | 2.745 |
| 18952 | | | | | | | |
| ADI- | 305 | 5.13E−10 | NB | 4.21E−10 | NB | 0.034 | 0.022 |
| 18953 | | | | | | | |
| ADI- | 306 | 5.99E−10 | 2.56E−10 | 2.37E−09 | 2.50E−10 | 1.933 | 3.116 |
| 18955 | | | | | | | |
| ADI- | 307 | 1.82E−10 | NB | 2.24E−10 | NB | >10 | >10 |
| 18956 | | | | | | | |
| ADI- | 308 | 4.69E−10 | NB | 3.24E−10 | NB | 1.339 | 6.084 |
| 18957 | | | | | | | |
| ADI- | 309 | 2.86E−10 | NB | 3.02E−10 | NB | 0.587 | 3.364 |
| 18958 | | | | | | | |
| ADI- | 310 | 4.68E−09 | NB | NB | NB | 7.214 | 2.258 |
| 18959 | | | | | | | |
| ADI- | 311 | 1.78E−10 | NB | 1.83E−10 | NB | 0.034 | 0.107 |
| 18960 | | | | | | | |
| ADI- | 312 | 8.83E−09 | NB | 2.28E−08 | NB | 4.439 | >10 |
| 18962 | | | | | | | |
| ADI- | 313 | | NB | NB | NB | 3.023 | 6.892 |
| 18965 | | | | | | | |
| ADI- | 314 | 5.78E−10 | NB | 5.62E−10 | NB | 0.044 | 0.130 |
| 18966 | | | | | | | |
| ADI- | 315 | 8.09E−10 | NB | NB | NB | 6.737 | 3.651 |
| 18967 | | | | | | | |
| ADI- | 316 | 1.98E−09 | 4.38E−10 | 6.02E−10 | 3.05E−10 | 0.909 | 0.541 |
| 18968 | | | | | | | |
| ADI- | 317 | 3.03E−10 | NB | 2.97E−10 | NB | 0.035 | 0.187 |
| 18969 | | | | | | | |
| ADI- | 318 | 1.04E−08 | 6.84E−09 | 4.45E−10 | 4.12E−10 | >10 | 0.333 |
| 18970 | | | | | | | |
| ADI- | 319 | 1.57E−10 | NB | 1.68E−10 | NB | 0.039 | 0.114 |
| 18971 | | | | | | | |
| ADI- | 320 | 2.98E−10 | NB | 3.68E−10 | NB | 0.016 | 0.107 |
| 18972 | | | | | | | |
| ADI- | 321 | 3.78E−09 | 4.95E−10 | 2.63E−09 | 3.94E−10 | 9.605 | 6.273 |
| 18973 | | | | | | | |
| ADI- | 322 | 2.53E−10 | NB | 2.90E−10 | NB | 0.030 | 0.105 |
| 18974 | | | | | | | |
| ADI- | 323 | 2.67E−10 | NB | 2.98E−10 | NB | 0.037 | 0.174 |
| 18975 | | | | | | | |
| ADI- | 324 | 4.03E−09 | 2.36E−09 | 1.24E−09 | 2.09E−10 | 6.290 | 10.600 |
| 18976 | | | | | | | |
| ADI- | 325 | 7.86E−10 | NB | 9.66E−10 | NB | 0.108 | 0.117 |
| 18977 | | | | | | | |
| ADI- | 326 | 3.00E−09 | NB | NB | NB | >10 | >10 |
| 18978 | | | | | | | |
| ADI- | 327 | 1.89E−10 | NB | 1.84E−10 | NB | 0.012 | 0.031 |
| 18979 | | | | | | | |
| ADI- | 328 | NB | 5.33E−10 | NB | 3.50E−10 | 3.599 | >10 |
| 18980 | | | | | | | |
| ADI- | 329 | 1.53E−09 | 3.53E−10 | 1.15E−09 | 2.80E−10 | >10 | >10 |
| 18981 | | | | | | | |
| ADI- | 330 | 1.92E−10 | 7.65E−10 | 1.95E−10 | 7.47E−10 | 0.018 | 0.053 |
| 18982 | | | | | | | |
| ADI- | 331 | 1.71E−09 | NB | 5.81E−10 | NB | 0.028 | 0.075 |
| 18983 | | | | | | | |
| ADI- | 332 | 1.29E−08 | 8.03E−10 | 6.08E−09 | 6.59E−10 | >10 | >10 |
| 18984 | | | | | | | |
| ADI- | 333 | 5.66E−10 | NB | 1.70E−09 | NB | 0.034 | 0.090 |
| 18985 | | | | | | | |
| ADI- | 334 | 2.68E−09 | NB | 2.38E−10 | NB | 0.464 | 0.123 |
| 18986 | | | | | | | |
| ADI- | 335 | 4.49E−10 | NB | 5.24E−10 | NB | 0.015 | 0.027 |
| 18987 | | | | | | | |
| ADI- | 336 | 2.93E−10 | NB | 3.70E−10 | NB | 0.089 | 0.370 |
| 18988 | | | | | | | |
| ADI- | 337 | 3.51E−09 | 3.56E−10 | 3.92E−09 | 3.77E−10 | >10 | >10 |
| 18989 | | | | | | | |
| ADI- | 338 | 8.90E−10 | 2.94E−10 | 4.91E−10 | 2.52E−10 | 0.580 | 0.845 |
| 18990 | | | | | | | |
| ADI- | 339 | 1.35E−10 | | 1.52E−10 | | 0.028 | 0.228 |
| 18991 | | | | | | | |
| ADI- | 340 | 7.66E−10 | 1.53E−09 | 9.69E−10 | 9.07E−10 | 2.546 | 5.692 |
| 18992 | | | | | | | |
| ADI- | 341 | 2.55E−10 | NB | 2.77E−10 | NB | 0.078 | 0.128 |
| 18993 | | | | | | | |
| ADI- | 342 | 3.10E−10 | NB | 3.31E−10 | NB | 0.047 | 0.108 |
| 18994 | | | | | | | |
| ADI- | 343 | 1.20E−10 | 1.23E−08 | 1.27E−10 | | 0.043 | 0.125 |
| 18995 | | | | | | | |
| ADI- | 344 | 2.52E−09 | NB | 3.60E−09 | NB | >10 | >10 |
| 18996 | | | | | | | |
| ADI- | 345 | 5.01E−09 | NB | 5.32E−09 | NB | >10 | >10 |
| 18997 | | | | | | | |
| ADI- | 346 | 1.57E−10 | 1.24E−08 | 1.72E−10 | NB | 0.055 | 0.458 |
| 18998 | | | | | | | |
| ADI- | 347 | 5.92E−10 | 1.67E−10 | 1.02E−09 | 1.41E−10 | 1.805 | 6.465 |
| 18999 | | | | | | | |
| ADI- | 348 | 1.10E−10 | 1.75E−10 | 1.04E−10 | 1.28E−10 | 0.037 | 0.129 |
| 19000 | | | | | | | |
| ADI- | 349 | 1.07E−09 | 1.93E−10 | 1.06E−09 | 1.49E−10 | >10 | 3.259 |
| 19001 | | | | | | | |
| ADI- | 350 | 1.63E−09 | NB | NB | NB | 2.886 | 4.507 |
| 19002 | | | | | | | |
| ADI- | 351 | 1.61E−10 | NB | 1.68E−10 | NB | 0.047 | 0.125 |
| 19003 | | | | | | | |
| ADI- | 352 | 2.28E−10 | NB | 2.73E−10 | NB | 0.020 | 0.128 |
| 19004 | | | | | | | |
| ADI- | 353 | 9.63E−10 | NB | 9.64E−10 | NB | 0.041 | 0.110 |
| 19005 | | | | | | | |
| ADI- | 354 | 1.75E−09 | NB | NB | NB | 4.891 | 5.059 |
| 19006 | | | | | | | |
| ADI- | 355 | 6.18E−10 | 9.69E−10 | 6.08E−10 | 4.57E−10 | 0.208 | 0.370 |
| 19007 | | | | | | | |
| ADI- | 356 | 3.63E−09 | NB | NB | NB | 8.293 | >10 |
| 19008 | | | | | | | |
| ADI- | 357 | 4.42E−10 | NB | 4.66E−10 | NB | 0.062 | 0.066 |
| 19009 | | | | | | | |
| ADI- | 358 | 6.04E−09 | NB | 2.84E−09 | NB | >10 | 0.650 |
| 19010 | | | | | | | |
| ADI- | 359 | 2.15E−09 | NB | NB | NB | >10 | 6.237 |
| 19011 | | | | | | | |
| ADI- | 360 | 2.89E−09 | 3.04E−10 | 1.14E−09 | 3.14E−10 | >10 | >10 |
| 19012 | | | | | | | |
| ADI- | 361 | NB | 1.61E−08 | NB | 5.83E−10 | 9.504 | >10 |
| 19013 | | | | | | | |
| ADI- | 362 | 2.82E−09 | 3.59E−10 | 2.21E−09 | 2.77E−10 | 1.745 | >10 |
| 19014 | | | | | | | |
| ADI- | 363 | NB | NB | NB | NB | 0.052 | 0.092 |
| 19016 | | | | | | | |
| ADI- | 364 | 1.10E−08 | NB | 7.20E−09 | NB | 1.562 | 0.795 |
| 19017 | | | | | | | |

*NN; non-neutralizing, NB; non-binding, ND; not determined. IgG KDs were calculated for antibodies with BLI binding responses with BLI binding responses >0.1 nm. Antibodies with BLI binding responses <0.05 nm were designated as NB.

TABLE 4
Bin, patch, and antigenic site assignments for anti-RSV antibodies

| | Antibody | | | Antigenic |
|---|---|---|---|---|
| | number | Bin | Patch | Site |
| Name | (Ab #) | Assignment | Assignment | Assignment |
| ADI-18875 | 232 | D25 | 1, 2 | Ø |
| ADI-18876 | 233 | Mota | 5 | II |
| ADI-18877 | 234 | D25/mota/MPE8 | 4 | V |
| ADI-18878 | 235 | 101F/13390 | | |
| ADI-18879 | 236 | D25/mota/MPE8 | 4 | V |
| ADI-18880 | 237 | D25/mota/MPE8 | 4 | V |
| ADI-18882 | 238 | D25 | 1, 2 | Ø |
| ADI-18883 | 239 | D25 | 4 | V |
| ADI-18884 | 240 | 14469 | | I |
| ADI-18885 | 241 | 101F/13390 | | |
| ADI-18887 | 242 | Mota/13390 | | |
| ADI-18888 | 243 | Mota/101F/13390 | | |
| ADI-18889 | 244 | D25 | 1, 2 | Ø |
| ADI-18890 | 245 | D25 | 2 | Ø |
| ADI-18891 | 246 | D25 | 2, 1 | Ø |
| ADI-18892 | 247 | Mota/MPE8 | 4 | V |
| ADI-18893 | 248 | Mota/MPE8 | | III |
| ADI-18894 | 249 | D25 | | |
| ADI-18895 | 250 | Unknown | | |
| ADI-18896 | 251 | 101F/13390 | | |
| ADI-18897 | 252 | Mota/101F/13390 | | III |
| ADI-18898 | 253 | D25/mota/MPE8 | 4 | V |
| ADI-18899 | 254 | 101F/13390 | | I |
| ADI-18900 | 255 | D25 | 1 | Ø |
| ADI-18901 | 256 | Unknown | | |
| ADI-18902 | 257 | 14443 | 9 | IV |
| ADI-18903 | 258 | D25/mota/MPE8 | 4, 3 | V |
| ADI-18904 | 259 | D25/mota/MPE8 | 4 | V |
| ADI-18905 | 260 | MPE8 | | |
| ADI-18906 | 261 | Mota/101F/13390 | | |
| ADI-18907 | 262 | | | UK |
| ADI-18908 | 263 | Mota/MPE8 | | III |
| ADI-18909 | 264 | Mota | 5 | II |
| ADI-18910 | 265 | Unknown | | |
| ADI-18911 | 266 | Mota | | |
| ADI-18912 | 267 | Mota/MPE8 | | III |
| ADI-18913 | 268 | D25 | 1 | Ø |
| ADI-18915 | 269 | D25/mota | | |
| ADI-18916 | 270 | D25 | 1 | Ø |
| ADI-18917 | 271 | Mota/MPE8 | | III |
| ADI-18918 | 272 | Mota | | |
| ADI-18919 | 273 | | | UK |
| ADI-18920 | 274 | 101F | 9 | IV |
| ADI-18921 | 275 | 101F | | |
| ADI-18922 | 276 | Mota | | |
| ADI-18923 | 277 | Mota/MPE8/101F | | III |
| ADI-18924 | 278 | Unknown | | |
| ADI-18925 | 279 | 101F | | |
| ADI-18926 | 280 | D25/mota/MPE8 | 4 | V |
| ADI-18927 | 281 | D25/mota | | |
| ADI-18928 | 282 | D25 | 1, 2 | Ø |
| ADI-18929 | 283 | 101F | 1 | UK |
| ADI-18930 | 284 | D25 | 1, 2 | Ø |
| ADI-18931 | 285 | 101F | | IV |
| ADI-18932 | 286 | Mota | 5 | II |
| ADI-18933 | 287 | Unknown | | |
| ADI-18935 | 288 | Mota | 6, 5 | III |
| ADI-18936 | 289 | D25/mota | 4 | V |
| ADI-18937 | 290 | Mota | 5 | II |
| ADI-18938 | 291 | Mota/101F | | III |
| ADI-18939 | 292 | D25 | 9 | Ø |
| ADI-18940 | 293 | D25/mota | 1, 2 | V |
| ADI-18941 | 294 | Mota | | |
| ADI-18942 | 295 | Mota | | II |
| ADI-18943 | 296 | D25 | 5 | UK |
| ADI-18944 | 297 | D25/mota/MPE8 | 1, 2 | V |
| ADI-18946 | 298 | 101F | 4 | IV |
| ADI-18947 | 299 | 101F/13390 | | |
| ADI-18948 | 300 | 101F/13390 | | |
| ADI-18949 | 301 | D25/mota/MPE8 | 4 | V |
| ADI-18950 | 302 | 13390 | | I |
| ADI-18951 | 303 | Mota/13390 | | III |
| ADI-18952 | 304 | Mota/13390 | | III |
| ADI-18953 | 305 | D25 | 2 | Ø |
| ADI-18955 | 306 | 101F/13390 | | I |
| ADI-18956 | 307 | 14469 | | I |
| ADI-18957 | 308 | Mota/MPE8 | | III |
| ADI-18958 | 309 | Mota | 4 | V |
| ADI-18959 | 310 | 14443 | | |
| ADI-18960 | 311 | 14469 | 9 | IV |
| ADI-18962 | 312 | Mota/MPE8 | | |
| ADI-18965 | 313 | Unknown | | |
| ADI-18966 | 314 | D25/mota/MPE8 | 4 | V |
| ADI-18967 | 315 | 101F | 9 | IV |
| ADI-18968 | 316 | Mota | 5 | II |
| ADI-18969 | 317 | D25/mota/MPE8 | 4 | V |
| ADI-18970 | 318 | Mota/MPE8 | | |
| ADI-18971 | 319 | 14469 | 9 | IV |
| ADI-18972 | 320 | D25/mota/MPE8 | 4 | V |
| ADI-18973 | 321 | 13390 | | |
| ADI-18974 | 322 | D25/mota/MPE8 | 4 | V |
| ADI-18975 | 323 | D25/mota/MPE8 | 4 | V |
| ADI-18976 | 324 | 13390 | | |
| ADI-18977 | 325 | D25/mota | 4 | V |
| ADI-18978 | 326 | 14469 | | |
| ADI-18979 | 327 | Mota/MPE8 | 4 | V |
| ADI-18980 | 328 | Mota | | |
| ADI-18981 | 329 | 101F/13390 | | I |
| ADI-18982 | 330 | Mota/MPE8 | 4 | V |
| ADI-18983 | 331 | 101F | 3, 9 | Q |
| ADI-18984 | 332 | 13390 | | |
| ADI-18985 | 333 | D25/mota | 4 | V |
| ADI-18986 | 334 | D25 | | |
| ADI-18987 | 335 | D25 | | Ø |
| ADI-18988 | 336 | Mota/MPE8 | | III |
| ADI-18989 | 337 | 101F/13390 | | |
| ADI-18990 | 338 | Mota | 5 | II |
| ADI-18991 | 339 | 14443 | 9 | IV |
| ADI-18992 | 340 | 101F | | IV |
| ADI-18993 | 341 | Mota/MPE8 | | III |
| ADI-18994 | 342 | Mota/MPE8 | | III |
| ADI-18995 | 343 | 14443 | | IV |
| ADI-18996 | 344 | Unknown | | |
| ADI-18997 | 345 | D25/mota | | |
| ADI-18998 | 346 | 14443 | 9 | IV |
| ADI-18999 | 347 | 101F | 9 | IV |
| ADI-19000 | 348 | 14443 | 9 | IV |
| ADI-19001 | 349 | 101F/13390 | | I |
| ADI-19002 | 350 | Unknown | | UK |
| ADI-19003 | 351 | 14469 | 9 | IV |
| ADI-19004 | 352 | D25/mota/MPE8 | 4 | V |
| ADI-19005 | 353 | D25/mota | | V |
| ADI-19006 | 354 | Unknown | | UK |
| ADI-19007 | 355 | Mota/MPE8 | 5 | II |
| ADI-19008 | 356 | Unknown | | |
| ADI-19009 | 357 | D25 | 1 | Ø |
| ADI-19010 | 358 | Mota/MPE8 | | |
| ADI-19011 | 359 | Unknown | | |
| ADI-19012 | 360 | 13390 | | |
| ADI-19013 | 361 | Unknown | | |
| ADI-19014 | 362 | 101F/13390 | | |
| ADI-19016 | 363 | Mota/MPE8 | | |
| ADI-19017 | 364 | D25/mota | | |

TABLE 5
A subset of anti-RSV F antibodies
cross-neutralize human metapneumovirus.

| | | | | | Post- | |
|---|---|---|---|---|---|---|
| | Anti- | HMPV- | RSV- | Prefusion | fusion | RSV F |
| | body | A1 | A2 | RSV | RSV | Bind- |
| | number | IC₅₀ | IC₅₀ | F K_{D} | F K_{D} | ing |
| Name | (Ab #) | (μg/ml) | (μg/ml) | (M) | (M) | Site |
| ADI- | | 6.1 | 2.5 | 7.6 × | 1.5 × | IV* |
| 18992 | | | | 10⁻¹⁰ | 10⁻⁹ | |
| MPE8 | N/A | 0.07 | 0.04 | — | — | — |
| Control | | | | | | |

N/A, not applicable
*Binding site assignment based on competition only.

### Materials and Methods

### Study Design

[0221] To profile the antibody response to RSV F, peripheral blood mononuclear cells were obtained from a adult donor approximately between 20-35 years of age, and monoclonal antibodies from RSV F-reactive B cells were isolated thereform. The antibodies were characterized by sequencing, binding, epitope mapping, and neutralization assays. All samples for this study were collected with informed consent of volunteers. This study was unblinded and not randomized. At least two independent experiments were performed for each assay.

### Generation of RSV F Sorting Probes

[0222] The soluble prefusion and postfusion probes were based on the RSV F ΔFP and DS-Cav1 constructs that we previously crystallized and determined to be in the pre- and postfusion conformations, respectively (11, 15). To increase the avidity of the probes and to uniformly orient the RSV F proteins, the trimeric RSV F proteins were coupled to tetrameric streptavidin through biotinylation of a C-terminal AviTag. For each probe, both a C-terminal His-Avi tagged version and a C-terminal StrepTagII version were co-transfected into FreeStyle 293-F cells. The secreted proteins were purified first over Ni-NTA resin to remove trimers lacking the His-Avi tag. The elution from the Ni-NTA purification was then purified over Strep-Tactin resin. Due to the low avidity of a single StrepTagII for the Strep-Tactin resin, additional washing steps were able to remove singly StrepTagged trimers. This resulted in the purification of trimers containing two StrepTagII tagged monomers and therefore only one His-Avi tagged monomer. This purification scheme results in a single AviTag per trimer which greatly reduces the aggregation or ‘daisy-chaining’ that occurs when trimeric proteins containing three AviTags are incubated with tetrameric streptavidin. RSV F trimers were biotinylated using biotin ligase BirA according to the manufacturer's instructions (Avidity, LLC). Biotinylated proteins were separated from excess biotin by size-exclusion chromotography on a Superdex 200 column (GE Healthcare). Quantification of the number of biotin moieties per RSV F trimer was performed using the Quant*Tag Biotin Kit per the manufacturer's instructions (Vector Laboratories).

### Single B-Cell Sorting

[0223] Peripheral blood mononuclear cells were stained using anti-human IgG (BV605), IgA (FITC), CD27 (BV421), CD8 (PerCP-Cy5.5), CD14 (PerCP-Cy5.5), CD19 (PECy7), CD20 (PECy7) and a mixture of dual-labeled DS-Cav1 and F ΔFP tetramers (50 nM each). Dual-labeled RSV F tetramers were generated by incubating the individual AviTagged RSV F proteins with premium-grade phycoerythrin-labeled streptavidin (Molecular Probes) or premium-grade allophycocyanin-labeled streptavidin for at least 20 minutes on ice at a molar ratio of 4:1. Tetramers were prepared fresh for each experiment. Single cells were sorted on a BD fluorescence-activated cell sorter Aria II into 96-well PCR plates (BioRad) containing 20 μL/well of lysis buffer [5 μL of 5× first strand cDNA buffer (Invitrogen), 0.25 μL RNaseOUT (Invitrogen), 1.25 μL dithiothreitol (Invitrogen), 0.625 μL NP-40 (New England Biolabs), and 12.6 μL dH₂O]. Plates were immediately frozen on dry ice before storage at −80° C.

### Amplification and Cloning of Antibody Variable Genes

[0224] Single B cell PCR was performed as described previously (22). Briefly, IgH, Igλ and Igκ variable genes were amplified by RT-PCR and nested PCR reactions using cocktails of IgG and IgA-specific primers (22). The primers used in the second round of PCR contained 40 base pairs of 5′ and 3′ homology to the cut expression vectors to allow for cloning by homologous recombination into Saccharomyces cerevisiae (40). PCR products were cloned into S. cerevisiae using the lithium acetate method for chemical transformation (41). Each transformation reaction contained 20 μL of unpurified heavy chain and light chain PCR product and 200 ng of cut heavy and light chain plasmids. Following transformation, individual yeast colonies were picked for sequencing and characterization.

### Expression and Purification of IgGs and Fab Fragments

[0225] Anti-RSV F IgGs were expressed in S. cerevisiae cultures grown in 24-well plates, as described previously (23). Fab fragments used for competition assays were generated by digesting the IgGs with papain for 2 h at 30° C. The digestion was terminated by the addition of iodoacetamide, and the Fab and Fc mixtures were passed over Protein A agarose to remove Fc fragments and undigested IgG. The flowthrough of the Protein A resin was then passed over CaptureSelect™ IgG-CH1 affinity resin (ThermoFischer Scientific), and eluted with 200 mM acetic acid/50 mM NaCl pH 3.5 into ⅛th volume 2M Hepes pH 8.0. Fab fragments then were buffer-exchanged into PBS pH 7.0.

### Biolayer Interferometry Binding Analysis

[0226] IgG binding to DS-Cav1 and FΔ FP was determined by BLI measurements using a FortéBio Octet HTX instrument (Pall Life Sciences). For high-throughput K_{D} screening, IgGs were immobilized on AHQ sensors (Pall Life Sciences) and exposed to 100 nM antigen in PBS containing 0.1% BSA (PBSF) for an association step, followed by a dissociation step in PBSF buffer. Data was analyzed using the FortéBio Data Analysis Software 7. The data was fit to a 1:1 binding model to calculate an association and dissociation rate, and K_{D} was calculated using the ratio k_{d}/kₐ.

### Antibody Competition Assays

[0227] Antibody competition assays were performed as previously described (23). Antibody competition was measured by the ability of a control anti-RSV F Fab to inhibit binding of yeast surface-expressed anti-RSV F IgGs to either DS-Cav1 or FΔ FP. 50 nM biotinylated DS-Cav1 or FΔ FP was pre-incubated with 1 μM competitor Fab for 30 min at room temperature and then added to a suspension of yeast expressing anti-RSV F IgG. Unbound antigen was removed by washing with PBS containing 0.1% BSA (PBSF). After washing, bound antigen was detected using streptavidin Alexa Fluor 633 at a 1:500 dilution (Life Technologies) and analyzed by flow cytometry using a FACSCanto II (BD Biosciences). The level of competition was assessed by measuring the fold reduction in antigen binding in the presence of competitor Fab relative to an antigen-only control. Antibodies were considered competitors when a greater than five-fold reduction was observed in the presence of control Fab relative to an antigen-only control.

### Expression, Purification and Biotinylation of PreF Patch Variants

[0228] A panel of 9 patches of 2-4 mutations uniformly covering the surface of the preF molecule was designed based on the structure of prefusion RSV F (10). For known antigenic sites, including those recognized by motavizumab, 101F, D25, AM14 and MPE8, patches incorporated residues associated with viral escape or known to be critical for antibody binding. Residues with high conservation across 184 subtype A, subtype B and bovine RSV F sequences were avoided where possible to minimize the likelihood of disrupting protein structure. The mutations present in each patch variant are shown in FIG. 7A. Mutations for each patch variant were cloned into the prefusion stabilized RSV F (DS-Cav1) construct with a C-terminal AviTag for site specific biotinylation. Proteins were secreted from FreeStyle 293-F cells, purified over Ni-NTA resin and biotinylated using biotin ligase BirA according to the manufacturer's instructions (Avidity, LLC). Biotinylated proteins were separated from excess biotin by size-exclusion chromotography on a Superdex 200 column (GE Healthcare). A deglycosylated version of DS-Cav1 was produced by expressing DS-Cav1 in the presence of 1 μM kifunensine and digesting with 10% (wt/wt) EndoH before biotinylation.

### Luminex Assay for Patch Variant Binding

[0229] Binding of isolated antibodies to the patch variants was determined using a high-throughput Luminex assay. Each biotinylated variant and a DS-Cav1 control were coupled to avidin coated MagPlex beads (Bio-Rad), each with a bead identification number reflecting a unique ratio of red and infrared dyes embedded within the bead. The coupled beads were then mixed with a six-fold serial dilution of each antibody, ranging from 400 nM to 1.4 pM, in a 384-well plate. Beads were washed using a magnetic microplate washer (BioTek) before incubation with a PE conjugated mouse anti-human IgG Fc secondary antibody (Southern Biotech). Beads were classified and binding of PE was measured using a FLEXMAP 3D flow cytometer (Luminex).

### RSV Neutralization Assays

[0230] Viral stocks were prepared and maintained as previously described (61). Recombinant mKate-RSV expressing prototypic subtype A (strain A2) and subtype B (18537) F genes and the Katushka fluorescent protein were constructed as reported by Hotard et al. (62). HEp-2 cells were maintained in Eagle's minimal essential medium containing 10% fetal bovine serum supplemented with glutamine, penicillin and streptomycin. Antibody neutralization was measured by a fluorescence plate reader neutralization assay (15). A 30 μL solution of culture media containing 2.4×10⁴ HEp-2 cells was seeded in 384-well black optical bottom plate (Nunc, Thermo Scientific). IgG samples were serially diluted four-fold from 1:10 to 1:163840 and an equal volume of recombinant mKate-RSV A2 was added. Samples were mixed and incubated at 37° C. for one hour. After incubation, 50 μL mixture of sample and virus was added to cells in 384-well plate, and incubated at 37° C. for 22-24 hours. The assay plate was then measured for fluorescence intensity in a microplate reader at Ex 588 nm and Em 635 nm (SpectraMax Paradigm, molecular devices). IC₅₀ of neutralization for each sample was calculated by curve fitting using Prism (GraphPad Software Inc.).

### Human Metapneuomovirus Neutralization Assays

[0231] Predetermined amounts of GFP-expressing hMPV recombinant virus (NL/1/00, A1 sublineage, a kind gift of Bernadette van den Hoogen and Ron Fouchier, Rotterdam, the Netherlands) were mixed with serial dilutions of monoclonal antibodies before being added to cultures of Vero-118 cells growing in 96-well plates with Dulbecco's Modified Eagle's medium supplemented with 10% fetal calf serum. Thirty-six hours later, the medium was removed, PBS was added and the amount of GFP per well was measured with a Tecan microplate reader M200. Fluorescence values were represented as percent of a virus control without antibody.

### Polyreactivity Assay

[0232] Antibody polyreactivity was assessed using a previously described high-throughput assay that measures binding to solubilized CHO cell membrane preparations (SMPs) (43). Briefly, two million IgG-presenting yeast were transferred into a 96-well assay plate and pelleted to remove the supernatant. The pellet was resuspended in 50 μL of 1:10 diluted stock b-SMPs and incubated on ice for 20 minutes. Cells were then washed twice with ice-cold PBSF and the cell pellet was re-suspended in 50 μL of secondary labeling mix (Extravidin-R-PE, anti-human LCFITC, and propidium iodide). The mix was incubated on ice for 20 minutes followed by two washes with ice-cold PBSF. Cells were then re-suspended in 100 μL of ice-cold PBSF, and the plate was run on a FACSCanto II (BD Biosciences) using a HTS sample injector. Flow cytometry data was analyzed for mean fluorescence intensity in the R-PE channel and normalized to proper controls in order to assess non-specific binding.

### REFERENCES AND NOTES

[0233] 1. A. L. Rogovik, B. Carleton, A. Solimano, R. D. Goldman, Palivizumab for the prevention of respiratory syncytial virus infection. Can Fam Physician 56, 769-772 (2010).

[0234] 2. B. S. Graham, Biological challenges and technological opportunities for respiratory syncytial virus vaccine development. Immunol Rev 239, 149-166 (2011).

[0235] 3. J. R. Groothuis, E. A. Simoes, V. G. Hemming, Respiratory syncytial virus (RSV) infection in preterm infants and the protective effects of RSV immune globulin (RSVIG). Respiratory Syncytial Virus Immune Globulin Study Group. Pediatrics 95, 463-467 (1995).

[0236] 4. M. Magro, V. Mas, K. Chappell, M. Vazquez, O. Cano, D. Luque, M. C. Terron, J. A. Melero, C. Palomo, Neutralizing antibodies against the preactive form of respiratory syncytial virus fusion protein offer unique possibilities for clinical intervention. Proc Natl Acad Sci USA 109, 3089-3094 (2012).

[0237] 5. S. Johnson, C. Oliver, G. A. Prince, V. G. Hemming, D. S. Pfarr, S. C. Wang, M. Dormitzer, J. O'Grady, S. Koenig, J. K. Tamura, R. Woods, G. Bansal, D. Couchenour, E. Tsao, W. C. Hall, J. F. Young, Development of a humanized monoclonal antibody (MEDI-493) with potent in vitro and in vivo activity against respiratory syncytial virus. J Infect Dis 176, 1215-1224 (1997).

[0238] 6. J. A. Beeler, K. van Wyke Coelingh, Neutralization epitopes of the F glycoprotein of respiratory syncytial virus: effect of mutation upon fusion function. J Virol 63, 2941-2950 (1989).

[0239] 7. R. A. Karron, D. A. Buonagurio, A. F. Georgiu, S. S. Whitehead, J. E. Adamus, M. L. Clements-Mann, D. O. Harris, V. B. Randolph, S. A. Udem, B. R. Murphy, M. S. Sidhu, Respiratory syncytial virus (RSV) SH and G proteins are not essential for viral replication in vitro: clinical evaluation and molecular characterization of a cold-passaged, attenuated RSV subgroup B mutant. Proc Natl Acad Sci USA 94, 13961-13966 (1997).

[0240] 8. J. O. Ngwuta, M. Chen, K. Modjarrad, M. G. Joyce, M. Kanekiyo, A. Kumar, H. M. Yassine, S. M. Moin, A. M. Killikelly, G. Y. Chuang, A. Druz, I. S. Georgiev, E. J. Rundlet, M. Sastry, G. B. Stewart-Jones, Y. Yang, B. Zhang, M. C. Nason, C. Capella, M. E. Peeples, J. E. Ledgerwood, J. S. McLellan, P. D. Kwong, B. S. Graham, Prefusion F-specific antibodies determine the magnitude of RSV neutralizing activity in human sera. Sci Transl Med 7, 309ra162 (2015).

[0241] 9. T. I.-R. S. Group, Palivizumab, a humanized respiratory syncytial virus monoclonal antibody, reduces hospitalization from respiratory syncytial virus infection in high-risk infants. Pediatrics 102, 531-537 (1998).

[0242] 10. J. S. McLellan, M. Chen, S. Leung, K. W. Graepel, X. Du, Y. Yang, T. Zhou, U. Baxa, E. Yasuda, T. Beaumont, A. Kumar, K. Modjarrad, Z. Zheng, M. Zhao, N. Xia, P. D. Kwong, B. S. Graham, Structure of RSV fusion glycoprotein trimer bound to a prefusion-specific neutralizing antibody. Science 340, 1113-1117 (2013).

[0243] 11. J. S. McLellan, Y. Yang, B. S. Graham, P. D. Kwong, Structure of respiratory syncytial virus fusion glycoprotein in the postfusion conformation reveals preservation of neutralizing epitopes. J Virol 85, 7788-7796 (2011).

[0244] 12. K. A. Swanson, E. C. Settembre, C. A. Shaw, A. K. Dey, R. Rappuoli, C. W. Mandl, P. R. Dormitzer, A. Carfi, Structural basis for immunization with postfusion respiratory syncytial virus fusion F glycoprotein (RSV F) to elicit high neutralizing antibody titers. Proc Natl Acad Sci USA 108, 9619-9624 (2011).

[0245] 13. L. Liljeroos, M. A. Krzyzaniak, A. Helenius, S. J. Butcher, Architecture of respiratory syncytial virus revealed by electron cryotomography. Proc Natl Acad Sci USA 110, 11133-11138 (2013).

[0246] 14. A. Krarup, D. Truan, P. Furmanova-Hollenstein, L. Bogaert, P. Bouchier, I. J. Bisschop, M. N. Widjojoatmodjo, R. Zahn, H. Schuitemaker, J. S. McLellan, J. P. Langedijk, A highly stable prefusion RSV F vaccine derived from structural analysis of the fusion mechanism. Nat Commun 6, 8143 (2015).

[0247] 15. J. S. McLellan, M. Chen, M. G. Joyce, M. Sastry, G. B. Stewart-Jones, Y. Yang, B. Zhang, L. Chen, S. Srivatsan, A. Zheng, T. Zhou, K. W. Graepel, A. Kumar, S. Moin, J. C. Boyington, G. Y. Chuang, C. Soto, U. Baxa, A. Q. Bakker, H. Spits, T. Beaumont, Z. Zheng, N. Xia, S. Y. Ko, J. P. Todd, S. Rao, B. S. Graham, P. D. Kwong, Structure-based design of a fusion glycoprotein vaccine for respiratory syncytial virus. Science 342, 592-598 (2013).

[0248] 16. M. J. Kwakkenbos, S. A. Diehl, E. Yasuda, A. Q. Bakker, C. M. van Geelen, M. V. Lukens, G. M. van Bleek, M. N. Widjojoatmodjo, W. M. Bogers, H. Mei, A. Radbruch, F. A. Scheeren, H. Spits, T. Beaumont, Generation of stable monoclonal antibody-producing B cell receptor-positive human memory B cells by genetic programming. Nat Med 16, 123-128 (2010).

[0249] 17. D. Corti, S. Bianchi, F. Vanzetta, A. Minola, L. Perez, G. Agatic, B. Guarino, C. Silacci, J. Marcandalli, B. J. Marsland, A. Piralla, E. Percivalle, F. Sallusto, F. Baldanti, A. Lanzavecchia, Cross-neutralization of four paramyxoviruses by a human monoclonal antibody. Nature 501, 439-443 (2013).

[0250] 18. M. Magro, D. Andreu, P. Gomez-Puertas, J. A. Melero, C. Palomo, Neutralization of human respiratory syncytial virus infectivity by antibodies and low-molecular-weight compounds targeted against the fusion glycoprotein. J Virol 84, 7970-7982 (2010).

[0251] 19. G. Taylor, E. J. Stott, J. Furze, J. Ford, P. Sopp, Protective epitopes on the fusion protein of respiratory syncytial virus recognized by murine and bovine monoclonal antibodies. J Gen Virol 73 (Pt 9), 2217-2223 (1992).

[0252] 20. L. J. Calder, L. Gonzalez-Reyes, B. Garcia-Barreno, S. A. Wharton, J. J. Skehel, D. C. Wiley, J. A. Melero, Electron microscopy of the human respiratory syncytial virus fusion protein and complexes that it forms with monoclonal antibodies. Virology 271, 122-131 (2000).

[0253] 21. M. S. Gilman, S. M. Moin, V. Mas, M. Chen, N. K. Patel, K. Kramer, Q. Zhu, S. C. Kabeche, A. Kumar, C. Palomo, T. Beaumont, U. Baxa, N. D. Ulbrandt, J. A. Melero, B. S. Graham, J. S. McLellan, Characterization of a Prefusion-Specific Antibody That Recognizes a Quaternary, Cleavage-Dependent Epitope on the RSV Fusion Glycoprotein. PLoS Pathog 11, e1005035 (2015).

[0254] 22. M. G. Joyce, A. K. Wheatley, P. V. Thomas, G. Y. Chuang, C. Soto, R. T. Bailer, A. Druz, I. S. Georgiev, R. A. Gillespie, M. Kanekiyo, W. P. Kong, K. Leung, S. N. Narpala, M. S. Prabhakaran, E. S. Yang, B. Zhang, Y. Zhang, M. Asokan, J. C. Boyington, T. Bylund, S. Darko, C. R. Lees, A. Ransier, C. H. Shen, L. Wang, J. R. Whittle, X. Wu, H. M. Yassine, C. Santos, Y. Matsuoka, Y. Tsybovsky, U. Baxa, J. C. Mullikin, K. Subbarao, D. C. Douek, B. S. Graham, R. A. Koup, J. E. Ledgerwood, M. Roederer, L. Shapiro, P. D. Kwong, J. R. Mascola, A. B. McDermott, Vaccine-Induced Antibodies that Neutralize Group 1 and Group 2 Influenza A Viruses. Cell 166, 609-623 (2016).

[0255] 23. J. Truck, M. N. Ramasamy, J. D. Galson, R. Rance, J. Parkhill, G. Lunter, A. J. Pollard, D. F. Kelly, Identification of antigen-specific B cell receptor sequences using public repertoire analysis. J Immunol 194, 252-261 (2015).

[0256] 24. P. Parameswaran, Y. Liu, K. M. Roskin, K. K. Jackson, V. P. Dixit, J. Y. Lee, K. L. Artiles, S. Zompi, M. J. Vargas, B. B. Simen, B. Hanczaruk, K. R. McGowan, M. A. Tariq, N. Pourmand, D. Koller, A. Balmaseda, S. D. Boyd, E. Harris, A. Z. Fire, Convergent antibody signatures in human dengue. Cell host & microbe 13, 691-700 (2013).

[0257] 25. K. J. Jackson, Y. Liu, K. M. Roskin, J. Glanville, R. A. Hoh, K. Seo, E. L. Marshall, T. C. Gurley, M. A. Moody, B. F. Haynes, E. B. Walter, H. X. Liao, R. A. Albrecht, A. Garcia-Sastre, J. Chaparro-Riggers, A. Rajpal, J. Pons, B. B. Simen, B. Hanczaruk, C. L. Dekker, J. Laserson, D. Koller, M. M. Davis, A. Z. Fire, S. D. Boyd, Human responses to influenza vaccination show seroconversion signatures and convergent antibody rearrangements. Cell host & microbe 16, 105-114 (2014).

[0258] 26. F. W. Henderson, A. M. Collier, W. A. Clyde, Jr., F. W. Denny, Respiratory-syncytial-virus infections, reinfections and immunity. A prospective, longitudinal study in young children. The New England journal of medicine 300, 530-534 (1979).

[0259] 27. M. A. Moody, B. F. Haynes, Antigen-specific B cell detection reagents: use and quality control. Cytometry A 73, 1086-1092 (2008).

[0260] 28. M. S. Habibi, A. Jozwik, S. Makris, J. Dunning, A. Paras, J. P. DeVincenzo, C. A. de Haan, J. Wrammert, P. J. Openshaw, C. Chiu, I. Mechanisms of Severe Acute Influenza Consortium, Impaired Antibody-mediated Protection and Defective IgA B-Cell Memory in Experimental Infection of Adults with Respiratory Syncytial Virus. Am J Respir Crit Care Med 191, 1040-1049 (2015).

[0261] 29. T. Tiller, E. Meffre, S. Yurasov, M. Tsuiji, M. C. Nussenzweig, H. Wardemann, Efficient generation of monoclonal antibodies from single human B cells by single cell RT-PCR and expression vector cloning. J Immunol Methods 329, 112-124 (2008).

[0262] 30. Z. A. Bornholdt, H. L. Turner, C. D. Murin, W. Li, D. Sok, C. A. Souders, A. E. Piper, A. Goff, J. D. Shamblin, S. E. Wollen, T. R. Sprague, M. L. Fusco, K. B. Pommert, L. A. Cavacini, H. L. Smith, M. Klempner, K. A. Reimann, E. Krauland, T. U. Gerngross, K. D. Wittrup, E. O. Saphire, D. R. Burton, P. J. Glass, A. B. Ward, L. M. Walker, Isolation of potent neutralizing antibodies from a survivor of the 2014 Ebola virus outbreak. Science 351, 1078-1083 (2016).

[0263] 31. J. F. Scheid, H. Mouquet, N. Feldhahn, M. S. Seaman, K. Velinzon, J. Pietzsch, R. G. Ott, R. M. Anthony, H. Zebroski, A. Hurley, A. Phogat, B. Chakrabarti, Y. Li, M. Connors, F. Pereyra, B. D. Walker, H. Wardemann, D. Ho, R. T. Wyatt, J. R. Mascola, J. V. Ravetch, M. C. Nussenzweig, Broad diversity of neutralizing antibodies isolated from memory B cells in HIV-infected individuals. Nature 458, 636-640 (2009).

[0264] 32. J. Wrammert, K. Smith, J. Miller, W. A. Langley, K. Kokko, C. Larsen, N. Y. Zheng, I. Mays, L. Garman, C. Helms, J. James, G. M. Air, J. D. Capra, R. Ahmed, P. C. Wilson, Rapid cloning of high-affinity human monoclonal antibodies against influenza virus. Nature 453, 667-671 (2008).

[0265] 33. S. D. Boyd, B. A. Gaeta, K. J. Jackson, A. Z. Fire, E. L. Marshall, J. D. Merker, J. M. Maniar, L. N. Zhang, B. Sahaf, C. D. Jones, B. B. Simen, B. Hanczaruk, K. D. Nguyen, K. C. Nadeau, M. Egholm, D. B. Miklos, J. L. Zehnder, A. M. Collins, Individual variation in the germline Ig gene repertoire inferred from variable region gene rearrangements. J Immunol 184, 6986-6992 (2010).

[0266] 34. J. Sui, W. C. Hwang, S. Perez, G. Wei, D. Aird, L. M. Chen, E. Santelli, B. Stec, G. Cadwell, M. Ali, H. Wan, A. Murakami, A. Yammanuru, T. Han, N. J. Cox, L. A. Bankston, R. O. Donis, R. C. Liddington, W. A. Marasco, Structural and functional bases for broad-spectrum neutralization of avian and human influenza A viruses. Nat Struct Mol Biol 16, 265-273 (2009).

[0267] 35. C. C. Huang, M. Venturi, S. Majeed, M. J. Moore, S. Phogat, M. Y. Zhang, D. S. Dimitrov, W. A. Hendrickson, J. Robinson, J. Sodroski, R. Wyatt, H. Choe, M. Farzan, P. D. Kwong, Structural basis of tyrosine sulfation and VH-gene usage in antibodies that recognize the HIV type 1 coreceptor-binding site on gp120. Proc Natl Acad Sci USA 101, 2706-2711 (2004).

[0268] 36. C. H. Chan, K. G. Hadlock, S. K. Foung, S. Levy, V(H)1-69 gene is preferentially used by hepatitis C virus-associated B cell lymphomas and by normal B cells responding to the E2 viral antigen. Blood 97, 1023-1026 (2001).

[0269] 37. E. E. Godoy-Lozano, J. Tellez-Sosa, G. Sanchez-Gonzalez, H. Samano-Sanchez, A. Aguilar-Salgado, A. Salinas-Rodriguez, B. Cortina-Ceballos, H. Vivanco-Cid, K. Hernandez-Flores, J. M. Pfaff, K. M. Kahle, B. J. Doranz, R. E. Gomez-Barreto, H. Valdovinos-Torres, I. Lopez-Martinez, M. H. Rodriguez, J. Martinez-Barnetche, Lower IgG somatic hypermutation rates during acute dengue virus infection is compatible with a germinal center-independent B cell response. Genome Med 8, 23 (2016).

[0270] 38. J. Wrammert, D. Koutsonanos, G. M. Li, S. Edupuganti, J. Sui, M. Morrissey, M. McCausland, I. Skountzou, M. Hornig, W. I. Lipkin, A. Mehta, B. Razavi, C. Del Rio, N. Y. Zheng, J. H. Lee, M. Huang, Z. Ali, K. Kaur, S. Andrews, R. R. Amara, Y. Wang, S. R. Das, C. D. O'Donnell, J. W. Yewdell, K. Subbarao, W. A. Marasco, M. J. Mulligan, R. Compans, R. Ahmed, P. C. Wilson, Broadly cross-reactive antibodies dominate the human B cell response against 2009 pandemic H1N1 influenza virus infection. J Exp Med 208, 181-193 (2011).

[0271] 39. S. F. Andrews, Y. Huang, K. Kaur, L. I. Popova, I. Y. Ho, N. T. Pauli, C. J. Henry Dunand, W. M. Taylor, S. Lim, M. Huang, X. Qu, J. H. Lee, M. Salgado-Ferrer, F. Krammer, P. Palese, J. Wrammert, R. Ahmed, P. C. Wilson, Immune history profoundly affects broadly protective B cell responses to influenza. Sci Transl Med 7, 316ra192 (2015).

[0272] 40. M. Liu, G. Yang, K. Wiehe, N. I. Nicely, N. A. Vandergrift, W. Rountree, M. Bonsignori, S. M. Alam, J. Gao, B. F. Haynes, G. Kelsoe, Polyreactivity and autoreactivity among HIV-1 antibodies. J Virol 89, 784-798 (2015).

[0273] 41. H. Mouquet, J. F. Scheid, M. J. Zoller, M. Krogsgaard, R. G. Ott, S. Shukair, M. N. Artyomov, J. Pietzsch, M. Connors, F. Pereyra, B. D. Walker, D. D. Ho, P. C. Wilson, M. S. Seaman, H. N. Eisen, A. K. Chakraborty, T. J. Hope, J. V. Ravetch, H. Wardemann, M. C. Nussenzweig, Polyreactivity increases the apparent affinity of anti-HIV antibodies by heteroligation. Nature 467, 591-595 (2010).

[0274] 42. R. L. Kelly, T. Sun, T. Jain, I. Caffry, Y. Yu, Y. Cao, H. Lynaugh, M. Brown, M. Vasquez, K. D. Wittrup, Y. Xu, High throughput cross-interaction measures for human IgG1 antibodies correlate with clearance rates in mice. MAbs, 0 (2015).

[0275] 43. Y. Xu, W. Roach, T. Sun, T. Jain, B. Prinz, T. Y. Yu, J. Torrey, J. Thomas, P. Bobrowicz, M. Vasquez, K. D. Wittrup, E. Krauland, Addressing polyspecificity of antibodies selected from an in vitro yeast presentation system: a FACS-based, high-throughput selection and analytical tool. Protein Eng Des Sel 26, 663-670 (2013).

[0276] 44. D. R. Bowley, A. F. Labrijn, M. B. Zwick, D. R. Burton, Antigen selection from an HIV-1 immune antibody library displayed on yeast yields many novel antibodies compared to selection from the same library displayed on phage. Protein Eng Des Sel 20, 81-90 (2007).

[0277] 45. H. Wu, D. S. Pfarr, S. Johnson, Y. A. Brewah, R. M. Woods, N. K. Patel, W. I. White, J. F. Young, P. A. Kiener, Development of motavizumab, an ultra-potent antibody for the prevention of respiratory syncytial virus infection in the upper and lower respiratory tract. Journal of molecular biology 368, 652-665 (2007).

[0278] 46. J. S. McLellan, M. Chen, J. S. Chang, Y. Yang, A. Kim, B. S. Graham, P. D. Kwong, Structure of a major antigenic site on the respiratory syncytial virus fusion glycoprotein in complex with neutralizing antibody 101F. J Virol 84, 12236-12244 (2010).

[0279] 47. P. W. Parren, D. R. Burton, The antiviral activity of antibodies in vitro and in vivo. Advances in immunology 77, 195-262 (2001).

[0280] 48. J. Foote, H. N. Eisen, Kinetic and affinity limits on antibodies produced during immune responses. Proc Natl Acad Sci USA 92, 1254-1256 (1995).

[0281] 49. F. D. Batista, M. S. Neuberger, Affinity dependence of the B cell response to antigen: a threshold, a ceiling, and the importance of off-rate. Immunity 8, 751-759 (1998).

[0282] 50. J. E. Schuster, R. G. Cox, A. K. Hastings, K. L. Boyd, J. Wadia, Z. Chen, D. R. Burton, R. A. Williamson, J. V. Williams, A broadly neutralizing human monoclonal antibody exhibits in vivo efficacy against both human metapneumovirus and respiratory syncytial virus. J Infect Dis 211, 216-225 (2015).

[0283] 51. B. F. Fernie, P. J. Cote, Jr., J. L. Gerin, Classification of hybridomas to respiratory syncytial virus glycoproteins. Proceedings of the Society for Experimental Biology and Medicine. Society for Experimental Biology and Medicine (New York, N.Y.) 171, 266-271 (1982).

[0284] 52. P. J. Cote, Jr., B. F. Fernie, E. C. Ford, J. W. Shih, J. L. Gerin, Monoclonal antibodies to respiratory syncytial virus: detection of virus neutralization and other antigen-antibody systems using infected human and murine cells. Journal of virological methods 3, 137-147 (1981).

[0285] 53. E. E. Walsh, J. Hruska, Monoclonal antibodies to respiratory syncytial virus proteins: identification of the fusion protein. J Virol 47, 171-177 (1983).

[0286] 54. L. J. Anderson, P. Bingham, J. C. Hierholzer, Neutralization of respiratory syncytial virus by individual and mixtures of F and G protein monoclonal antibodies. J Virol 62, 4232-4238 (1988).

[0287] 55. G. E. Scopes, P. J. Watt, P. R. Lambden, Identification of a linear epitope on the fusion glycoprotein of respiratory syncytial virus. J Gen Virol 71 (Pt 1), 53-59 (1990).

[0288] 56. J. Arbiza, G. Taylor, J. A. Lopez, J. Furze, S. Wyld, P. Whyte, E. J. Stott, G. Wertz, W. Sullender, M. Trudel, et al., Characterization of two antigenic sites recognized by neutralizing monoclonal antibodies directed against the fusion glycoprotein of human respiratory syncytial virus. J Gen Virol 73 (Pt 9), 2225-2234 (1992).

[0289] 57. J. A. Lopez, R. Bustos, C. Orvell, M. Berois, J. Arbiza, B. Garcia-Barreno, J. A. Melero, Antigenic structure of human respiratory syncytial virus fusion glycoprotein. J Virol 72, 6922-6928 (1998).

[0290] 58. B. J. DeKosky, T. Kojima, A. Rodin, W. Charab, G. C. Ippolito, A. D. Ellington, G. Georgiou, In-depth determination and analysis of the human paired heavy- and light-chain antibody repertoire. Nat Med 21, 86-91 (2015).

[0291] 59. U.S. National Library of Medicine, (NCT02290340, https://clinicaltrials.gov/).

[0292] 60. PATH, RSV Vaccine Snapshot (2016 http://sites.path.org/vaccinedevelopment/files/2016/07/RSV-snapshot-July_13_2016.pdf).

[0293] 61. B. S. Graham, M. D. Perkins, P. F. Wright, D. T. Karzon, Primary respiratory syncytial virus infection in mice. Journal of medical virology 26, 153-162 (1988).

[0294] 62. A. L. Hotard, F. Y. Shaikh, S. Lee, D. Yan, M. N. Teng, R. K. Plemper, J. E. Crowe, Jr., M. L. Moore, A stabilized respiratory syncytial virus reverse genetics system amenable to recombination-mediated mutagenesis. Virology 434, 129-136 (2012).
[0295] An informal sequence listing is provided in Table 6, below. The informal sequence listing provides the following sixteen (16) sequence elements contained in each of the 133 antibodies, identified as described above and designated as Antibody Numbers (Ab #) 232 through 364, in the following order:
   [0296] Heavy chain variable region (“HC”) nucleic acid sequence
   [0297] Heavy chain variable region (“HC”) amino acid sequence
   [0298] Heavy chain variable region CDR H1 (“H1”) amino acid sequence
   [0299] Heavy chain variable region CDR H1 (“H1”) nucleic acid sequence
   [0300] Heavy chain variable region CDR H2 (“H2”) amino acid sequence
   [0301] Heavy chain variable region CDR H2 (“H2”) nucleic acid sequence
   [0302] Heavy chain variable region CDR H3 (“H3”) amino acid sequence
   [0303] Heavy chain variable region CDR H3 (“H3”) nucleic acid sequence
   [0304] Light chain variable region(“LC”) nucleic acid sequence
   [0305] Light chain variable region (“LC”) amino acid sequence
   [0306] Light chain variable region CDR L1 (“L1”) amino acid sequence
   [0307] Light chain variable region CDR L1 (“L1”) nucleic acid sequence
   [0308] Light chain variable region CDR L2 (“L2”) amino acid sequence
   [0309] Light chain variable region CDR L2 (“L2”) nucleic acid sequence
   [0310] Light chain variable region CDR L3 (“L3”) amino acid sequence
   [0311] Light chain variable region CDR L3 (“L3”) nucleic acid sequence
[0312] The informal sequence listing for antibodies 365-372 provides the following ten (10) sequence elements contained in each of the 8 antibodies, identified as described above and designated as Antibody Numbers (Ab #) 365 through 372, in the following order:
   [0313] Heavy chain variable region (“HC”) nucleic acid sequence
   [0314] Heavy chain variable region (“HC”) amino acid sequence
   [0315] Heavy chain variable region CDR H1 (“H1”) amino acid sequence
   [0316] Heavy chain variable region CDR H2 (“H2”) amino acid sequence
   [0317] Heavy chain variable region CDR H3 (“H3”) amino acid sequence
   [0318] Light chain variable region(“LC”) nucleic acid sequence
   [0319] Light chain variable region (“LC”) amino acid sequence
   [0320] Light chain variable region CDR L1 (“L1”) amino acid sequence
   [0321] Light chain variable region CDR L2 (“L2”) amino acid sequence
   [0322] Light chain variable region CDR L3 (“L3”) amino acid sequence

TABLE 6
Informal Sequence Listing

| Antibody | Seq. | SEQ ID | |
|---|---|---|---|
| No. | Ref. No. | NO. | Sequence |
| 232 | 3697 | 1 | CAGGTGCAGCTACAGCAGTGGGGCGCAGGACTGTTGA |
| | | | AGCCTTCGGAGACCCTGTCCCTCACCTGCGCTGTCTAT |
| | | | GGTGGGTCCTTCAGTGGTTATTCCTGGAGCTGGATCCG |
| | | | CCAGACCCCAGGGAAGGGGCTGGAGTGGATTGGGGA |
| | | | AATCAATCATAGAGGAAGCACCAACTACAACCCGTCC |
| | | | CTCAAGAGTCGAGTCACCATGTCAGTGGACACGTCCC |
| | | | AGAACCAGATCTCCCTGAGGGTGACCTCTGTGACCGC |
| | | | CGCGGACACGGCTGTATATTTCTGTGCGGGGACCAAT |
| | | | TATGGAGAGGTTAATACGAGTAACCAGTACTTCTTCG |
| | | | GTATGGACGTCTGGGGCCAAGGGACCACGGTCACCGT |
| | | | CTCCTCA |
| 232 | 3698 | 2 | QVQLQQWGAGLLKPSETLSLTCAVYGGSFSGYSWSWIR |
| | | | QTPGKGLEWIGEINHRGSTNYNPSLKSRVTMSVDTSQNQ |
| | | | ISLRVTSVTAADTAVYFCAGTNYGEVNTSNQYFFGMDV |
| | | | WGQGTTVTVSS |
| 232 | 3699 | 3 | GSFSGYSWS |
| 232 | 3700 | 4 | GGGTCCTTCAGTGGTTATTCCTGGAGC |
| 232 | 3701 | 5 | EINHRGSTNYNPSLKS |
| 232 | 3702 | 6 | GAAATCAATCATAGAGGAAGCACCAACTACAACCCGT |
| | | | CCCTCAAGAGT |
| 232 | 3703 | 7 | AGTNYGEVNTSNQYFFGMDV |
| 232 | 3704 | 8 | GCGGGGACCAATTATGGAGAGGTTAATACGAGTAACC |
| | | | AGTACTTCTTCGGTATGGACGTC |
| 232 | 3705 | 9 | GACATCCAGGTGACCCAGTCTCCATCCTCCCTGTCTGC |
| | | | ATCTGTAGGAGACAGAGTCACCATCACTTGCCGGGCA |
| | | | AGTCAGAGCATTGGCACCTATTTAAATTGGTATCAGC |
| | | | AGAAACCAGGGAAACCCCCTAAACTCCTGATCTATGC |
| | | | TGCATCCAATTTGGAAAGTGGGGTCCCATCAAGTTTC |
| | | | AGTGGCAGTGGATCTGGGACACATTTCACTCTCACCA |
| | | | TCAGCAGTCTGCAACCTGAACATTTTGCAACTTACTAC |
| | | | TGTCAACAGAGTTACAGTACCCCGCTCACTTTCGGCG |
| | | | GAGGGACCAAGGTGGAAATCAAA |
| 232 | 3706 | 10 | DIQVTQSPSSLSASVGDRVTITCRASQSIGTYLNWYQQKP |
| | | | GKPPKLLIYAASNLESGVPSSFSGSGSGTHFTLTISSLQPE |
| | | | HFATYYCQQSYSTPLTFGGGTKVEIK |
| 232 | 3707 | 11 | RASQSIGTYLN |
| 232 | 3708 | 12 | CGGGCAAGTCAGAGCATTGGCACCTATTTAAAT |
| 232 | 3709 | 13 | AASNLES |
| 232 | 3710 | 14 | GCTGCATCCAATTTGGAAAGT |
| 232 | 3711 | 15 | QQSYSTPLT |
| 232 | 3712 | 16 | CAACAGAGTTACAGTACCCCGCTCACT |
| 233 | 3713 | 17 | CAGGTGCAGCTGCAGGAGTCGGGCCCAGGACTGGTGA |
| | | | AGCCTTCACAGACCCTGTCCCTCACCTGCACTGTCTCT |
| | | | GGTCCCTCCATCAGCAGTGGTGATTACTACTGGACTTG |
| | | | GATCCGCCAGCCCCCAGGGAAGGGCCTGGAGTGGATT |
| | | | GGCTACATCTATAACAGTGGGAGCACCGACTACAACC |
| | | | CGTCCCTCAAGAGTCGTATCACCATGTCACTAGACAG |
| | | | GTCCAAGAACCAGTTCTCCCTGAATCTGAGCTCTGTG |
| | | | ACTGCCGCAGACACGGCCGTGTATTTCTGTGCCAGGG |
| | | | ATGTGGGTACTCTGGTACTACCAACTGTTGCTTACTAC |
| | | | TACGGCATGGACGTCTGGGGCCAAGGGACCACGGTCA |
| | | | CCGTCTCCTCA |
| 233 | 3714 | 18 | QVQLQESGPGLVKPSQTLSLTCTVSGPSISSGDYYWTWI |
| | | | RQPPGKGLEWIGYIYNSGSTDYNPSLKSRITMSLDRSKN |
| | | | QFSLNLSSVTAADTAVYFCARDVGTLVLPTVAYYYGMD |
| | | | VWGQGTTVTVSS |
| 233 | 3715 | 19 | PSISSGDYYWT |
| 233 | 3716 | 20 | CCCTCCATCAGCAGTGGTGATTACTACTGGACT |
| 233 | 3717 | 21 | YIYNSGSTDYNPSLKS |
| 233 | 3718 | 22 | TACATCTATAACAGTGGGAGCACCGACTACAACCCGT |
| | | | CCCTCAAGAGT |
| 233 | 3719 | 23 | ARDVGTLVLPTVAYYYGMDV |
| 233 | 3720 | 24 | GCCAGGGATGTGGGTACTCTGGTACTACCAACTGTTG |
| | | | CTTACTACTACGGCATGGACGTC |
| 233 | 3721 | 25 | GAAATTGTATTGACGCAGTCTCCAGGCACCCTGTCTTT |
| | | | GTCTCCGGGGGAAAGAGCCACCCTCTCCTGCAGGGCC |
| | | | AGTGAGAGTATTAGCAGCAGCTACTTAGCCTGGTACC |
| | | | AGCAGAAACCTGGCCAGGCTCCCAGACTCCTCATCTA |
| | | | TGATGCGTCCAGCAGGGCCACTGGCATCCCAGACAGG |
| | | | TTCAGTGGCAGTGGGTCTGGGACAGACTTCACTCTCA |
| | | | CCATCAGCAGTCTGGAGCCTGAAGATTTTGCAGTGTA |
| | | | TTACTGTCAGCAGTATGGTAGCTCACCCCTGGTCACTT |
| | | | TCGGCCCTGGGACCAAAGTGGATATCAAA |
| 233 | 3722 | 26 | EIVLTQSPGTLSLSPGERATLSCRASESISSSYLAWYQQKP |
| | | | GQAPRLLIYDASSRATGIPDRFSGSGSGTDFTLTISSLEPE |
| | | | DFAVYYCQQYGSSPLVTFGPGTKVDIK |
| 233 | 3723 | 27 | RASESISSSYLA |
| 233 | 3724 | 28 | AGGGCCAGTGAGAGTATTAGCAGCAGCTACTTAGCC |
| 233 | 3725 | 29 | DASSRAT |
| 233 | 3726 | 30 | GATGCGTCCAGCAGGGCCACT |
| 233 | 3727 | 31 | QQYGSSPLVT |
| 233 | 3728 | 32 | CAGCAGTATGGTAGCTCACCCCTGGTCACT |
| 234 | 3729 | 33 | CAGGTCCAGCTGGTGCAGTCTGGAACTGAGGTGAAGA |
| | | | AGCCTGGGGCCTCAGTGAAGGTCTCCTGTAAGGCTGC |
| | | | TGGTTACACCTTTAGCAACTACGGTGTCAGTTGGGTGC |
| | | | GACAGGCCCCTGGACAGGGGCTTGAGTGGATGGGATG |
| | | | GATCAGCGCTTATAATGGTAACACAAAATTTGCACAG |
| | | | AAGGTCCAGGGCAGACTCACCATGACCACAGACACAT |
| | | | CTACCAGCACAGCCTACATGGAATTGAGGAACCTCAG |
| | | | ATCTGACGACACGGCCGTGTATTATTGTGCGAGAGAA |
| | | | TCAGGGGCAACAGCGGCTGCTATGTTTGACTACTGGG |
| | | | GCCAGGGAACCCTGGTCACCGTCTCCTCA |
| 234 | 3730 | 34 | QVQLVQSGTEVKKPGASVKVSCKAAGYTFSNYGVSWV |
| | | | RQAPGQGLEWMGWISAYNGNTKFAQKVQGRLTMTTDT |
| | | | STSTAYMELRNLRSDDTAVYYCARESGATAAAMFDYW |
| | | | GQGTLVTVSS |
| 234 | 3731 | 35 | YTFSNYGVS |
| 234 | 3732 | 36 | TACACCTTTAGCAACTACGGTGTCAGT |
| 234 | 3733 | 37 | WISAYNGNTKFAQKVQG |
| 234 | 3734 | 38 | TGGATCAGCGCTTATAATGGTAACACAAAATTTGCAC |
| | | | AGAAGGTCCAGGGC |
| 234 | 3735 | 39 | ARESGATAAAMFDY |
| 234 | 3736 | 40 | GCGAGAGAATCAGGGGCAACAGCGGCTGCTATGTTTG |
| | | | ACTAC |
| 234 | 3737 | 41 | GAAACGACACTCACGCAGTCTCCACTCTCCCTGCCCG |
| | | | TCACCCTTGGACAGCCGGCCTCCATCTCCTGCAGGTCT |
| | | | AGTCAAAGCCTCGAATACAGTGATGGAAACATCTACT |
| | | | TGAGTTGGTTTCAACAGAGGCCAGGCCAATCTCCAAG |
| | | | GCGCCTAATTTATAAGGTTTCTCACCGGGACTCTGGG |
| | | | GTCCCAGACAGATTCAGCGGCAGTGGGTCAGGCACTG |
| | | | ATTTCACACTGAAAATCGCCAGGGTGGAGGCTGAGGA |
| | | | TGTTGCAGTTTATTACTGCATGCAAGCTATACACTGGC |
| | | | CTCGAACTTTTGGCCAGGGGACCAAAGTGGATATCAA |
| | | | A |
| 234 | 3738 | 42 | ETTLTQSPLSLPVTLGQPASISCRSSQSLEYSDGNIYLSWF |
| | | | QQRPGQSPRRLIYKVSHRDSGVPDRFSGSGSGTDFTLKIA |
| | | | RVEAEDVAVYYCMQAIHWPRTFGQGTKVDIK |
| 234 | 3739 | 43 | RSSQSLEYSDGNIYLS |
| 234 | 3740 | 44 | AGGTCTAGTCAAAGCCTCGAATACAGTGATGGAAACA |
| | | | TCTACTTGAGT |
| 234 | 3741 | 45 | KVSHRDS |
| 234 | 3742 | 46 | AAGGTTTCTCACCGGGACTCT |
| 234 | 3743 | 47 | MQAIHWPRT |
| 234 | 3744 | 48 | ATGCAAGCTATACACTGGCCTCGAACT |
| 235 | 3745 | 49 | CAGGTGCAGCTGCAGGAGTCGGGCCCAAGACTGGTGA |
| | | | AGCCTTCACAGACCCTGTCCCTCATCTGCGATGTCTCT |
| | | | GGTGGCTCCATCGGCAGTGGTGACCACTACTGGAGTT |
| | | | GGATCCGCCAGCCCCCCGGGAAGGGCCTCGAGTGGAT |
| | | | TGGGTACATCTATTACAGTGGGACCACTTACTACAAC |
| | | | CCGTCCCTCAAGAGTCGAGTGACCATTTCAGCAGACA |
| | | | CGTCCAAGAACCAGTTGTCCCTGAAATTGAGTTCTGT |
| | | | GACTGCCGCAGACACGGCCATTTATTTCTGTGCCAGA |
| | | | GATGGGGGTTATGATCACGTCTGGGGGACTCATCGTT |
| | | | ATTTCGACAAGTGGGGCCAGGGAACCCTGGTCACCGT |
| | | | CTCCTCA |
| 235 | 3746 | 50 | QVQLQESGPRLVKPSQTLSLICDVSGGSIGSGDHYWSWI |
| | | | RQPPGKGLEWIGYIYYSGTTYYNPSLKSRVTISADTSKN |
| | | | QLSLKLSSVTAADTAIYFCARDGGYDHVWGTHRYFDK |
| | | | WGQGTLVTVSS |
| 235 | 3747 | 51 | GSIGSGDHYWS |
| 235 | 3748 | 52 | GGCTCCATCGGCAGTGGTGACCACTACTGGAGT |
| 235 | 3749 | 53 | YIYYSGTTYYNPSLKS |
| 235 | 3750 | 54 | TACATCTATTACAGTGGGACCACTTACTACAACCCGTC |
| | | | CCTCAAGAGT |
| 235 | 3751 | 55 | ARDGGYDHVWGTHRYFDK |
| 235 | 3752 | 56 | GCCAGAGATGGGGGTTATGATCACGTCTGGGGGACTC |
| | | | ATCGTTATTTCGACAAG |
| 235 | 3753 | 57 | GAAATTGTATTGACACAGTCTCCAGGCACCCTGTCTTT |
| | | | GTCTCCCGGGGAAAGAGCCACCCTCTCCTGCAGGGCC |
| | | | AGTCAGAGTGTTAGCAACAGTTACTTAGCCTGGTACC |
| | | | AGCAGAAACCTGGCCAGGCTCCCAGGCTCCTCATCTA |
| | | | TGGTGTTTCCACCAGGGCCACTGGCATCCCAGACCGG |
| | | | TTCAGTGGCAGCGGGTCTGGGACAGACTTCACCCTCA |
| | | | CCATCAGCAGACTGGAACCTGAAGATTTTGCAATGTA |
| | | | TCACTGTCAGCAGTATGGTGCCTCACCTTGGACGTTCG |
| | | | GCCAAGGGACCAAAGTGGATATCAAA |
| 235 | 3754 | 58 | EIVLTQSPGTLSLSPGERATLSCRASQSVSNSYLAWYQQ |
| | | | KPGQAPRLLIYGVSTRATGIPDRFSGSGSGTDFTLTISRLE |
| | | | PEDFAMYHCQQYGASPWTFGQGTKVDIK |
| 235 | 3755 | 59 | RASQSVSNSYLA |
| 235 | 3756 | 60 | AGGGCCAGTCAGAGTGTTAGCAACAGTTACTTAGCC |
| 235 | 3757 | 61 | GVSTRAT |
| 235 | 3758 | 62 | GGTGTTTCCACCAGGGCCACT |
| 235 | 3759 | 63 | QQYGASPWT |
| 235 | 3760 | 64 | CAGCAGTATGGTGCCTCACCTTGGACG |
| 236 | 3761 | 65 | GAGGTGCAGCTGTTGGAGTCTGGAGGTGAGGTGAAGA |
| | | | AGCCTGGGGCCTCAGTGAAGGTCTCCTGCAGGGCCTC |
| | | | TGGTTACACCTTTAGAAACTATGGCCTCACCTGGGTGC |
| | | | GGCAGGCCCCCGGACAAGGGCTTGAGTGGATGGGAT |
| | | | GGATCAGCGCTTACAATGGAAACACAAACTATGCACA |
| | | | GAAGTTCCAGGGCAGAGTCACACTGACCACGGACACA |
| | | | TCCACGAGCACAGCCTACATGGAACTGAGGAGCCTAA |
| | | | GATCTGACGACACGGCCGTGTATTTCTGTGCGAGAGA |
| | | | CGTCCCCGGCCACGGCGCTGCCTTCATGGACGTCTGG |
| | | | GGCACAGGGACCACGGTCACCGTCTCCTCA |
| 236 | 3762 | 66 | EVQLLESGGEVKKPGASVKVSCRASGYTFRNYGLTWVR |
| | | | QAPGQGLEWMGWISAYNGNTNYAQKFQGRVTLTTDTS |
| | | | TSTAYMELRSLRSDDTAVYFCARDVPGHGAAFMDVWG |
| | | | TGTTVTVSS |
| 236 | 3763 | 67 | YTFRNYGLT |
| 236 | 3764 | 68 | TACACCTTTAGAAACTATGGCCTCACC |
| 236 | 3765 | 69 | WISAYNGNTNYAQKFQG |
| 236 | 3766 | 70 | TGGATCAGCGCTTACAATGGAAACACAAACTATGCAC |
| | | | AGAAGTTCCAGGGC |
| 236 | 3767 | 71 | ARDVPGHGAAFMDV |
| 236 | 3768 | 72 | GCGAGAGACGTCCCCGGCCACGGCGCTGCCTTCATGG |
| | | | ACGTC |
| 236 | 3769 | 73 | GACATCCAGTTGACCCAGTCTCCACTCTCCCTGCCCGT |
| | | | CACCCTTGGGCAGCCGGCCTCCATCTCCTGCAGGTCTA |
| | | | GTCAAAGCCTCGAAGCCAGTGATACAAATATCTACTT |
| | | | GAGTTGGTTTCAGCAGAGGCCAGGCCAATCTCCAAGG |
| | | | CGCCTAATTTATAAGATTTCTAACCGAGACTCTGGGGT |
| | | | CCCAGACAGATTCAGCGGCAGTGGGTCAGGCACTCAT |
| | | | TTCACACTGAGAATCAGCAGGGTGGAGGCTGACGATG |
| | | | TTGCGGTTTATTACTGCATGCAGGGTACACACTGGCCT |
| | | | CCGGCGTTCGGCCAGGGGACCAAAGTGGATATCAAA |
| 236 | 3770 | 74 | DIQLTQSPLSLPVTLGQPASISCRSSQSLEASDTNIYLSWF |
| | | | QQRPGQSPRRLIYKISNRDSGVPDRFSGSGSGTHFTLRISR |
| | | | VEADDVAVYYCMQGTHWPPAFGQGTKVDIK |
| 236 | 3771 | 75 | RSSQSLEASDTNIYLS |
| 236 | 3772 | 76 | AGGTCTAGTCAAAGCCTCGAAGCCAGTGATACAAATA |
| | | | TCTACTTGAGT |
| 236 | 3773 | 77 | KISNRDS |
| 236 | 3774 | 78 | AAGATTTCTAACCGAGACTCT |
| 236 | 3775 | 79 | MQGTHWPPA |
| 236 | 3776 | 80 | ATGCAGGGTACACACTGGCCTCCGGCG |
| 237 | 3777 | 81 | CAGGTCCAGCTGGTACAGTCTGGATCTGAGGTGAAGA |
| | | | AGCCTGGGGCCGCAGTGAAGGTCTCCTGCAAGGCTTC |
| | | | TGGTTACATCTTTGCCAACTTTGGTGTCAGCTGGGTGC |
| | | | GACAGGCCCCTGGACAAGGGCTTGAGTGGATGGGATG |
| | | | GATCAGCGCTTACAATGGTAACACAAACTATGCACAG |
| | | | AAGTTCCAGGGCAGAGTCATCATGACCACAGACACAT |
| | | | CCACGAGCACAGCCTACATGGAGCTGAGGAGCCTGAG |
| | | | ATCTGACGACACGGCCGTGTATTATTGTGCGAGAGAC |
| | | | CCCCCCGCCTACGCCGCTACATTGATGGACGTCTGGG |
| | | | GCAAAGGGACCACGGTCACTGTCTCCTCA |
| 237 | 3778 | 82 | QVQLVQSGSEVKKPGAAVKVSCKASGYIFANFGVSWVR |
| | | | QAPGQGLEWMGWISAYNGNTNYAQKFQGRVIMTTDTS |
| | | | TSTAYMELRSLRSDDTAVYYCARDPPAYAATLMDVWG |
| | | | KGTTVTVSS |
| 237 | 3779 | 83 | YIFANFGVS |
| 237 | 3780 | 84 | TACATCTTTGCCAACTTTGGTGTCAGC |
| 237 | 3781 | 85 | WISAYNGNTNYAQKFQG |
| 237 | 3782 | 86 | TGGATCAGCGCTTACAATGGTAACACAAACTATGCAC |
| | | | AGAAGTTCCAGGGC |
| 237 | 3783 | 87 | ARDPPAYAATLMDV |
| 237 | 3784 | 88 | GCGAGAGACCCCCCCGCCTACGCCGCTACATTGATGG |
| | | | ACGTC |
| 237 | 3785 | 89 | GAAATTGTATTGACGCAGTCTCCACTCTCCCTGCCCGT |
| | | | CACCCTTGGACAGTCGGCCTCCATCTCCTGCAGGTCTA |
| | | | GTCAAAGCCTCGAACACAGTGATACAAACACCTACTT |
| | | | GACTTGGTATCAGCAGAGGCCAGGCCAATCTCCAAGG |
| | | | CGGCTACTTTATAAGGTTTCTAACCGGGACTCTGGGGT |
| | | | CCCAGACAGATTCAGCGGCAGTGGGTCAGGCACTGAT |
| | | | TTCACACTGAAAATCAGCAGGGTGGAGGCTGAGGATG |
| | | | TTGGGGTTTATTACTGCATGCAAGGTACACACTGGCCT |
| | | | CCGACGTTCGGCCAAGGGACCAAAGTGGATATCAAA |
| 237 | 3786 | 90 | EIVLTQSPLSLPVTLGQSASISCRSSQSLEHSDTNTYLTWY |
| | | | QQRPGQSPRRLLYKVSNRDSGVPDRFSGSGSGTDFTLKIS |
| | | | RVEAEDVGVYYCMQGTHWPPTFGQGTKVDIK |
| 237 | 3787 | 91 | RSSQSLEHSDTNTYLT |
| 237 | 3788 | 92 | AGGTCTAGTCAAAGCCTCGAACACAGTGATACAAACA |
| | | | CCTACTTGACT |
| 237 | 3789 | 93 | KVSNRDS |
| 237 | 3790 | 94 | AAGGTTTCTAACCGGGACTCT |
| 237 | 3791 | 95 | MQGTHWPPT |
| 237 | 3792 | 96 | ATGCAAGGTACACACTGGCCTCCGACG |
| 238 | 3793 | 97 | CAGGTCCAGCTTGTACAGTCTGGGGCTGAGGTGAAGA |
| | | | AGCCTGGGTCCTCGGTGAGGGTCTCCTGCAAGGCCTC |
| | | | TGGAGGCACCTTCAGGGGCTATGGTCTCAGCTGGGTG |
| | | | CGACAGGCCCCTGGACAGGGACTCGAGTGGATGGGA |
| | | | GGGATCACCCATCTTTTTGGGACAGTCAGCTACGCTCC |
| | | | GAAGTTCCAGGGCAGACTCACGATCACCGCGGACGCA |
| | | | TCCACGGGCACAGCCTACATGGAGCTGAGCAGCCTGA |
| | | | TATCTGAGGACACGGCCGTATATTTTTGTGCGAGAGA |
| | | | TGCTTACGAAGTGTGGACCGGCTCTTATCTCCCCCCTT |
| | | | TTGACTACTGGGGCCAGGGAACAATGGTCACCGTCTC |
| | | | TTCA |
| 238 | 3794 | 98 | QVQLVQSGAEVKKPGSSVRVSCKASGGTFRGYGLSWVR |
| | | | QAPGQGLEWMGGITHLFGTVSYAPKFQGRLTITADAST |
| | | | GTAYMELSSLISEDTAVYFCARDAYEVWTGSYLPPFDY |
| | | | WGQGTMVTVSS |
| 238 | 3795 | 99 | GTFRGYGLS |
| 238 | 3796 | 100 | GGCACCTTCAGGGGCTATGGTCTCAGC |
| 238 | 3797 | 101 | GITHLFGTVSYAPKFQG |
| 238 | 3798 | 102 | GGGATCACCCATCTTTTTGGGACAGTCAGCTACGCTCC |
| | | | GAAGTTCCAGGGC |
| 238 | 3799 | 103 | ARDAYEVWTGSYLPPFDY |
| 238 | 3800 | 104 | GCGAGAGATGCTTACGAAGTGTGGACCGGCTCTTATC |
| | | | TCCCCCCTTTTGACTAC |
| 238 | 3801 | 105 | GATATTGTGATGACTCAGTCTCCAGGCACCCTGTCTTT |
| | | | GTCTCCCGGGGAAAGAGTCACCCTCTCCTGCAGGGCC |
| | | | AGTCAGATTATTCCAAGCAGTTACTTAGCCTGGTACC |
| | | | AGCAGAAACCTGGCCAGGCTCCCAGGCTCCTCATCTA |
| | | | TGGTGCATTCACCAGGGCCACTGACATCCCAGACAGG |
| | | | TTCAGTGGCAGTGGGTCTGGGACAGACTTCACTCTCA |
| | | | CCATCAGCAGACTGGAGCCTGAAGATTTTGCAGTATA |
| | | | TTATTGTCAGCAGTATGGTAGTTCATTTCTCACTTTCG |
| | | | GCGGAGGGACCAAGGTGGAAATCAAA |
| 238 | 3802 | 106 | DIVMTQSPGTLSLSPGERVTLSCRASQIIPSSYLAWYQQK |
| | | | PGQAPRLLIYGAFTRATDIPDRFSGSGSGTDFTLTISRLEP |
| | | | EDFAVYYCQQYGSSFLTFGGGTKVEIK |
| 238 | 3803 | 107 | RASQIIPSSYLA |
| 238 | 3804 | 108 | AGGGCCAGTCAGATTATTCCAAGCAGTTACTTAGCC |
| 238 | 3805 | 109 | GAFTRAT |
| 238 | 3806 | 110 | GGTGCATTCACCAGGGCCACT |
| 238 | 3807 | 111 | QQYGSSFLT |
| 238 | 3808 | 112 | CAGCAGTATGGTAGTTCATTTCTCACT |
| 239 | 3809 | 113 | CAGGTCCAGCTTGTGCAGTCTGGGCCTGAGGTAAAGA |
| | | | AGCCTGGGTCCTCAGTGACGGTCTCCTGCAAGGCTTCT |
| | | | GGAGGCACCTTCAGCAACTATGGTATTGCTTGGGTGC |
| | | | GACAGGCCCCTGGACAAGGGCTTGAGTGGATGGGATC |
| | | | AACAATCCCTATCCTTGGAACAGCAAGCTACAGACAG |
| | | | AGCTTAAAGGACAGAGTCACAATTACCGCGGACGCTT |
| | | | CCACGACCACAGTCTACATGGAAATGACTCGCCTCAG |
| | | | AACTGAGGACACGGCCGTCTATTTTTGTGCGAGAGTT |
| | | | CCGGAGAGTCTTGTGGCATCAAACGCTTATGCTGTTTG |
| | | | GGGCCAAGGGACGGTGGTCACTGTCTCCTCA |
| 239 | 3810 | 114 | QVQLVQSGPEVKKPGSSVTVSCKASGGTFSNYGIAWVR |
| | | | QAPGQGLEWMGSTIPILGTASYRQSLKDRVTITADASTT |
| | | | TVYMEMTRLRTEDTAVYFCARVPESLVASNAYAVWGQ |
| | | | GTVVTVSS |
| 239 | 3811 | 115 | GTFSNYGIA |
| 239 | 3812 | 116 | GGCACCTTCAGCAACTATGGTATTGCT |
| 239 | 3813 | 117 | STIPILGTASYRQSLKD |
| 239 | 3814 | 118 | TCAACAATCCCTATCCTTGGAACAGCAAGCTACAGAC |
| | | | AGAGCTTAAAGGAC |
| 239 | 3815 | 119 | ARVPESLVASNAYAV |
| 239 | 3816 | 120 | GCGAGAGTTCCGGAGAGTCTTGTGGCATCAAACGCTT |
| | | | ATGCTGTT |
| 239 | 3817 | 121 | GACATCCAGATGACCCAGTCTCCATCTTCCGTGTCTGC |
| | | | ATCTGTAGGAGACAGAGTCACCATCACTTGTCGGGCG |
| | | | AGCCAGGACATTAGCACCTGGTTAGCCTGGTATCAGC |
| | | | AGAGACCAGGGAAAGCCCCAAAACTCCTGATCTACAC |
| | | | TGCATCCAGTTTGCAAAGTGGGGTCCCATCAAGGTTC |
| | | | AGCGGCAGTGGATCTGGGACAGAGTTCACTCTCACCA |
| | | | TCAGCAGCCTGCAGCCTGAAGATTTTGCAACTTACTAT |
| | | | TGTCAACAGGGTACCAGTTTCCCATTCACTTTCGGCCC |
| | | | TGGGACCAAGCTGGAGATCAAA |
| 239 | 3818 | 122 | DIQMTQSPSSVSASVGDRVTITCRASQDISTWLAWYQQR |
| | | | PGKAPKLLIYTASSLQSGVPSRFSGSGSGTEFTLTISSLQP |
| | | | EDFATYYCQQGTSFPFTFGPGTKLEIK |
| 239 | 3819 | 123 | RASQDISTWLA |
| 239 | 3820 | 124 | CGGGCGAGCCAGGACATTAGCACCTGGTTAGCC |
| 239 | 3821 | 125 | TASSLQS |
| 239 | 3822 | 126 | ACTGCATCCAGTTTGCAAAGT |
| 239 | 3823 | 127 | QQGTSFPFT |
| 239 | 3824 | 128 | CAACAGGGTACCAGTTTCCCATTCACT |
| 240 | 3825 | 129 | GAGGTGCAGCTGGTGGAGTCTGGGGCTGAGATGAAG |
| | | | AAGCCTGGGGCCTCAGTGAAGGTTTCCTGCAAGGCTT |
| | | | CTGGATACACCTTCACTAACTATGCTATACATTGGGTG |
| | | | CGCCAGGCCCCCGGCCAAAGCCTTGAGTGGATGGGAT |
| | | | GGATCAACGCTGGCAATGGTAACACACAATATTCACA |
| | | | GAAGTTCCAGGGCAGAGTCACCTTTACCAGGGACACA |
| | | | TCCGCGAGCACGGTCTACATGGACCTGAGCAGCCTGA |
| | | | GATCTGAAGACACGGCTGTCTATTACTGTGCGAGAGG |
| | | | CCAAATTGTTGTTATACCACGTGCTAATTTCTGGTTCG |
| | | | ACCCCTGGGGCCAGGGAACCCTGGTCACCGTCTCCTC |
| | | | A |
| 240 | 3826 | 130 | EVQLVESGAEMKKPGASVKVSCKASGYTFTNYAIHWVR |
| | | | QAPGQSLEWMGWINAGNGNTQYSQKFQGRVTFTRDTS |
| | | | ASTVYMDLSSLRSEDTAVYYCARGQIVVIPRANFWFDP |
| | | | WGQGTLVTVSS |
| 240 | 3827 | 131 | YTFTNYAIH |
| 240 | 3828 | 132 | TACACCTTCACTAACTATGCTATACAT |
| 240 | 3829 | 133 | WINAGNGNTQYSQKFQG |
| 240 | 3830 | 134 | TGGATCAACGCTGGCAATGGTAACACACAATATTCAC |
| | | | AGAAGTTCCAGGGC |
| 240 | 3831 | 135 | ARGQIVVIPRANFWFDP |
| 240 | 3832 | 136 | GCGAGAGGCCAAATTGTTGTTATACCACGTGCTAATT |
| | | | TCTGGTTCGACCCC |
| 240 | 3833 | 137 | GATATTGTGCTGACCCAGTCTCCACTCTCCCTGCCCGT |
| | | | CACCCCTGGAGAGCCGGCCTCCATCTCCTGCAGGTCT |
| | | | AGTCAGAGCCTCCTGCATAGTCATGGATACAACTATT |
| | | | TGGATTGGTACTTGCAGAAGCCAGGGCAGTCTCCACA |
| | | | GCTCCTGATCTATTTGGGTTCTAATCGGGCCTCCGGGG |
| | | | TCCCTGACAGGTTCAGTGGCAGTGGATCAGGCACAGA |
| | | | TTTTACACTGAAAATCAGCAGAGTGGAGGCTGAGGAT |
| | | | GTTGGGGTTTATTACTGCATGCAAACTCTACAAACTCC |
| | | | GATCACCTTCGGCCAAGGGACACGAATGGAGATTAAA |
| 240 | 3834 | 138 | DIVLTQSPLSLPVTPGEPASISCRSSQSLLHSHGYNYLDW |
| | | | YLQKPGQSPQLLIYLGSNRASGVPDRFSGSGSGTDFTLKI |
| | | | SRVEAEDVGVYYCMQTLQTPITFGQGTRMEIK |
| 240 | 3835 | 139 | RSSQSLLHSHGYNYLD |
| 240 | 3836 | 140 | AGGTCTAGTCAGAGCCTCCTGCATAGTCATGGATACA |
| | | | ACTATTTGGAT |
| 240 | 3837 | 141 | LGSNRAS |
| 240 | 3838 | 142 | TTGGGTTCTAATCGGGCCTCC |
| 240 | 3839 | 143 | MQTLQTPIT |
| 240 | 3840 | 144 | ATGCAAACTCTACAAACTCCGATCACC |
| 241 | 3841 | 145 | GAGGTGCAGCTGCAGGAGTCGGGCCCAGGACTGGTG |
| | | | AAGCCTTTACAGACCCTGTCCGTCACCTGCAGTGTCTC |
| | | | TGGTGGCTCCATCAGCAGTGGTGATAACTACTGGAGC |
| | | | TGGATCCGCCAGCGCCCAGGGAAGGGCCTGGAGTGG |
| | | | ATTGGGTACATCTATTACAGTGGGACCACCTACTACA |
| | | | ATCCGTCCCTCAAGAGTCGAGTTACCATATCAGCAGA |
| | | | CAGGTCTAAGAATCAGTTTTCTCTGAAGATGAATTCTC |
| | | | TGAGTGCCGCGGACACGGCCGTGTATTACTGTGCGAG |
| | | | AGATGGCGGATATGATCACATCTGGGGGACTCATCGT |
| | | | TATTTCGCCCTCTGGGGCCAGGGAACCCTGGTCACCG |
| | | | TCTCCTCA |
| 241 | 3842 | 146 | EVQLQESGPGLVKPLQTLSVTCSVSGGSISSGDNYWSWI |
| | | | RQRPGKGLEWIGYIYYSGTTYYNPSLKSRVTISADRSKN |
| | | | QFSLKMNSLSAADTAVYYCARDGGYDHIWGTHRYFAL |
| | | | WGQGTLVTVSS |
| 241 | 3843 | 147 | GSISSGDNYWS |
| 241 | 3844 | 148 | GGCTCCATCAGCAGTGGTGATAACTACTGGAGC |
| 241 | 3845 | 149 | YIYYSGTTYYNPSLKS |
| 241 | 3846 | 150 | TACATCTATTACAGTGGGACCACCTACTACAATCCGTC |
| | | | CCTCAAGAGT |
| 241 | 3847 | 151 | ARDGGYDHIWGTHRYFAL |
| 241 | 3848 | 152 | GCGAGAGATGGCGGATATGATCACATCTGGGGGACTC |
| | | | ATCGTTATTTCGCCCTC |
| 241 | 3849 | 153 | GAAACGACACTCACGCAGTCTCCAGGCACCCTGTCTT |
| | | | TGTCTCCAGGGGAAAGAGCCACCCTCTCCTGCAGGGC |
| | | | CAGTCAGAGTGTTAACAGCGACTACTTGGCCTGGTAC |
| | | | CAGCAGAAACTTGGCCAGGCTCCCAGGCTCCTCATTT |
| | | | ATGGTGTATCCAACAGGGCCACTGGCATCCCAGACAG |
| | | | GTTTACTGGGAGTGGGTCTGGGACAGACTTCACTCTC |
| | | | ACCATCAGCAGACTGGAGCCTGAAGATTTTGCAGTCT |
| | | | ATCACTGTCAGCAGTATGGTACCTCACCGTGGACGTT |
| | | | CGGCCAAGGGACCAAGGTGGAGATCAAA |
| 241 | 3850 | 154 | ETTLTQSPGTLSLSPGERATLSCRASQSVNSDYLAWYQQ |
| | | | KLGQAPRLLIYGVSNRATGIPDRFTGSGSGTDFTLTISRLE |
| | | | PEDFAVYHCQQYGTSPWTFGQGTKVEIK |
| 241 | 3851 | 155 | RASQSVNSDYLA |
| 241 | 3852 | 156 | AGGGCCAGTCAGAGTGTTAACAGCGACTACTTGGCC |
| 241 | 3853 | 157 | GVSNRAT |
| 241 | 3854 | 158 | GGTGTATCCAACAGGGCCACT |
| 241 | 3855 | 159 | QQYGTSPWT |
| 241 | 3856 | 160 | CAGCAGTATGGTACCTCACCGTGGACG |
| 242 | 3857 | 161 | CAGGTCCAGCTTGTACAGTCTGGGGCTGAGGTGAAGA |
| | | | GGCCTGGGTCCTCGGTGAAAGTCTCCTGTAAGGCCTC |
| | | | TGGAGGCACCTTCAGTAGTTATGCTCTCTCCTGGGTAC |
| | | | GGCAGGCCCCTGGACAAGGACTTGAGTGGATAGGGG |
| | | | GGATCATCCCTATGCATCGTGTAACAAATTACGCACA |
| | | | GAAATTTCGGGGCAGAGTCACAATTTCCGCGGACACA |
| | | | TCCACGAGTACGGCCTACTTGGAGGTGAACAGCCTGA |
| | | | GAGTTGAGGACACGGCCATGTATTACTGTGCGAGAGT |
| | | | GTTTTTCGGAACTTGTGGCGGTGCTTCGTGCTTCCCCT |
| | | | CTGACCTCTGGGGCCAGGGAACCCTGGTCACTGTCTC |
| | | | CTCA |
| 242 | 3858 | 162 | QVQLVQSGAEVKRPGSSVKVSCKASGGTFSSYALSWVR |
| | | | QAPGQGLEWIGGIIPMHRVTNYAQKFRGRVTISADTSTS |
| | | | TAYLEVNSLRVEDTAMYYCARVFFGTCGGASCFPSDLW |
| | | | GQGTLVTVSS |
| 242 | 3859 | 163 | GTFSSYALS |
| 242 | 3860 | 164 | GGCACCTTCAGTAGTTATGCTCTCTCC |
| 242 | 3861 | 165 | GIIPMHRVTNYAQKFRG |
| 242 | 3862 | 166 | GGGATCATCCCTATGCATCGTGTAACAAATTACGCAC |
| | | | AGAAATTTCGGGGC |
| 242 | 3863 | 167 | ARVFFGTCGGASCFPSDL |
| 242 | 3864 | 168 | GCGAGAGTGTTTTTCGGAACTTGTGGCGGTGCTTCGTG |
| | | | CTTCCCCTCTGACCTC |
| 242 | 3865 | 169 | GAAATTGTGTTGACACAGTCTCCATCCTTCGTGTCTGC |
| | | | TTCTGTCGGAGACGGGGTCACCATCACTTGCCGGGCC |
| | | | AGTCAGGCCATTAGCAGTTATTTAGCCTGGTATCAGC |
| | | | AAAAACCAGGGCAAGCCCCTAAACTCCTGATCTATGC |
| | | | TGCATCCACTTTGCAAGGTGGTGTCCCATCAAGGTTCA |
| | | | GCGGCAGTGGATCTGGGACACATTTCACTCTCACCAT |
| | | | CAGCAGCCTGCAGCCTGAAGATTTTGCAACTTATTACT |
| | | | GTCAGCAACTTCATAGTGATTTTCAGACTTTCGGCCCT |
| | | | GGGACCAAGGTGGAAATCAAA |
| 242 | 3866 | 170 | EIVLTQSPSFVSASVGDGVTITCRASQAISSYLAWYQQKP |
| | | | GQAPKLLIYAASTLQGGVPSRFSGSGSGTHFTLTISSLQPE |
| | | | DFATYYCQQLHSDFQTFGPGTKVEIK |
| 242 | 3867 | 171 | RASQAISSYLA |
| 242 | 3868 | 172 | CGGGCCAGTCAGGCCATTAGCAGTTATTTAGCC |
| 242 | 3869 | 173 | AASTLQG |
| 242 | 3870 | 174 | GCTGCATCCACTTTGCAAGGT |
| 242 | 3871 | 175 | QQLHSDFQT |
| 242 | 3872 | 176 | CAGCAACTTCATAGTGATTTTCAGACT |
| 243 | 3873 | 177 | CAGGTGCAGCTGGTGGAATCTGGGGGAGGCGTGGTCC |
| | | | AGCCTGGGAGGTCCCTGAGACTCTCCTGTGTAGCGTC |
| | | | TGGATTCAGCTTCAGTATGCATGGCATGCACTGGGTC |
| | | | CGCCAGGCTCCAGGCAAGGGGCTGGAGTGGGTGACA |
| | | | GCTATATGGTATGATGGAAGTAATAAATATTATGCAG |
| | | | ACTCCGTGAAGGGCCGATTCACGATCTCCAGAGACAA |
| | | | TTCTAGGAACACGCTGTATCTGCAAATGAACAGCCTG |
| | | | AGAGCCGAGGACACGGCTGTGTATTACTGTGCGAGAG |
| | | | ATCATGCCTCAACTCCATACTACATGGACGTCTGGGG |
| | | | CAAAGGGACCACGGTCACCGTCTCCTCA |
| 243 | 3874 | 178 | QVQLVESGGGVVQPGRSLRLSCVASGFSFSMHGMHWV |
| | | | RQAPGKGLEWVTAIWYDGSNKYYADSVKGRFTISRDNS |
| | | | RNTLYLQMNSLRAEDTAVYYCARDHASTPYYMDVWG |
| | | | KGTTVTVSS |
| 243 | 3875 | 179 | FSFSMHGMH |
| 243 | 3876 | 180 | TTCAGCTTCAGTATGCATGGCATGCAC |
| 243 | 3877 | 181 | AIWYDGSNKYYADSVKG |
| 243 | 3878 | 182 | GCTATATGGTATGATGGAAGTAATAAATATTATGCAG |
| | | | ACTCCGTGAAGGGC |
| 243 | 3879 | 183 | ARDHASTPYYMDV |
| 243 | 3880 | 184 | GCGAGAGATCATGCCTCAACTCCATACTACATGGACG |
| | | | TC |
| 243 | 3881 | 185 | GAAACGACACTCACGCAGTCTCCAGGCACCCTGTCTT |
| | | | TGTCTCCAGGGGAAAGCGCCACCCTCTCCTGCAGGAC |
| | | | CAGTCAGAGGATTAGCAGCACCTACTTAGCCTGGTAC |
| | | | CGGCAGAAACCTGGCCAGGCTCCCAGGCTCCTCATGT |
| | | | ATGGTGCATCCAGCAGGGCCACTGGCATCCCGGACAG |
| | | | GTTCAGTGGCAGTGGGTCTGGGACAGACTTCACTCTC |
| | | | ACCATCAGCAGTCTGGAGCCTGAAGATTTTGCACTAT |
| | | | ATTACTGTCAGCAGTATGGTAGCTTTCCGTGGACGTTC |
| | | | GGCCAAGGGACCAAGCTGGAGATCAAA |
| 243 | 3882 | 186 | ETTLTQSPGTLSLSPGESATLSCRTSQRISSTYLAWYRQK |
| | | | PGQAPRLLMYGASSRATGIPDRFSGSGSGTDFTLTISSLEP |
| | | | EDFALYYCQQYGSFPWTFGQGTKLEIK |
| 243 | 3883 | 187 | RTSQRISSTYLA |
| 243 | 3884 | 188 | AGGACCAGTCAGAGGATTAGCAGCACCTACTTAGCC |
| 243 | 3885 | 189 | GASSRAT |
| 243 | 3886 | 190 | GGTGCATCCAGCAGGGCCACT |
| 243 | 3887 | 191 | QQYGSFPWT |
| 243 | 3888 | 192 | CAGCAGTATGGTAGCTTTCCGTGGACG |
| 244 | 3889 | 193 | CAGGTGCAGCTACAGCAGTGGGGCGCAGGACTGTGG |
| | | | AAGCCTTCGCAGACCCTGTCCCTCACCTGCGCTGTCCA |
| | | | TGGTGGATCCCTCAGTGGCTACTCTTGGAGTTGGATCC |
| | | | GCCAGTCCCCAGGGAGGGGACTGGAGTGGATCGGCG |
| | | | AAGTCAATCGTAGGGGAACCACCAACTACAACCCCTC |
| | | | CCTCAAGGGTCGAGTCTCCATATCCTGGGACACGTCC |
| | | | AAGAACCAGGTCTCCCTGTCCCTGAGGTCTGTGACCG |
| | | | CCGCGGACACGGCTACATATTACTGTGCGGGGACCAA |
| | | | TGTTGGATTCGTTAATACCCATAACGACTACTACTTCG |
| | | | GTATGGACGTCTGGGGCCAAGGGACCACGGTCACCGT |
| | | | CTCCTCA |
| 244 | 3890 | 194 | QVQLQQWGAGLWKPSQTLSLTCAVHGGSLSGYSWSWI |
| | | | RQSPGRGLEWIGEVNRRGTTNYNPSLKGRVSISWDTSKN |
| | | | QVSLSLRSVTAADTATYYCAGTNVGFVNTHNDYYFGM |
| | | | DVWGQGTTVTVSS |
| 244 | 3891 | 195 | GSLSGYSWS |
| 244 | 3892 | 196 | GGATCCCTCAGTGGCTACTCTTGGAGT |
| 244 | 3893 | 197 | EVNRRGTTNYNPSLKG |
| 244 | 3894 | 198 | GAAGTCAATCGTAGGGGAACCACCAACTACAACCCCT |
| | | | CCCTCAAGGGT |
| 244 | 3895 | 199 | AGTNVGFVNTHNDYYFGMDV |
| 244 | 3896 | 200 | GCGGGGACCAATGTTGGATTCGTTAATACCCATAACG |
| | | | ACTACTACTTCGGTATGGACGTC |
| 244 | 3897 | 201 | GATATTGTGATGACTCAGTCTCCATCCTCCCTGTCTGC |
| | | | ATCGGTTGGAGACAGAGTCACCATCACTTGCCGGGCA |
| | | | AGTCAGAGCATAAGCAATTATGTAAATTGGTATCAGA |
| | | | AAAAAACAGGTCAAGTCCCTAAACTCCTGATCTATGG |
| | | | TGCATCCAATTTGGAAAGTGGGGTCCCATCAAGGTTC |
| | | | AGTGGCGGTGGATCTGGGACAGATTTCACTCTCACCA |
| | | | TCAGCAGTCTGCAACCTGAAGATTTTGCAACTTATTAC |
| | | | TGTCAACAGAGTTACAGTGTCCCGCTCACTTTCGGCG |
| | | | GAGGGACCAAGGTGGAAATCAAA |
| 244 | 3898 | 202 | DIVMTQSPSSLSASVGDRVTITCRASQSISNYVNWYQKK |
| | | | TGQVPKLLIYGASNLESGVPSRFSGGGSGTDFTLTISSLQP |
| | | | EDFATYYCQQSYSVPLTFGGGTKVEIK |
| 244 | 3899 | 203 | RASQSISNYVN |
| 244 | 3900 | 204 | CGGGCAAGTCAGAGCATAAGCAATTATGTAAAT |
| 244 | 3901 | 205 | GASNLES |
| 244 | 3902 | 206 | GGTGCATCCAATTTGGAAAGT |
| 244 | 3903 | 207 | QQSYSVPLT |
| 244 | 3904 | 208 | CAACAGAGTTACAGTGTCCCGCTCACT |
| 245 | 3905 | 209 | CAGGTCCAGCTTGTACAGTCTGGGGCTGAGGTGAAGA |
| | | | GGCCTGGATCCTCGGTGAAGGTCTCCTGCAAGGCGTC |
| | | | TGGAGGCACCTTCCGCGGCTACCATATCAGCTGGCTG |
| | | | CGCCAGGCCCCTGGACAGGGCCTCGAGTGGCTGGGAG |
| | | | GGATCACCCATTTGTTTGGGACAGTTAGTTACGCTCCG |
| | | | AAGTTCCAGGGCAGAGTCACCATCACCGCGGACGCAT |
| | | | CCACGGGCACACTTTACATGGTGTTGAACAGCCTGAA |
| | | | ACCTGAGGACACGGCCATTTATTATTGTGCGAGAGAT |
| | | | GCTTACGAGGTGTGGACTGGTTCTTATCTCCCCCCITT |
| | | | TGACTACTGGGGCCAGGGAACCCTGGTCACCGTCTCC |
| | | | TCA |
| 245 | 3906 | 210 | QVQLVQSGAEVKRPGSSVKVSCKASGGTFRGYHISWLR |
| | | | QAPGQGLEWLGGITHLFGTVSYAPKFQGRVTITADASTG |
| | | | TLYMVLNSLKPEDTAIYYCARDAYEVWTGSYLPPFDYW |
| | | | GQGTLVTVSS |
| 245 | 3907 | 211 | GTFRGYHIS |
| 245 | 3908 | 212 | GGCACCTTCCGCGGCTACCATATCAGC |
| 245 | 3909 | 213 | GITHLFGTVSYAPKFQG |
| 245 | 3910 | 214 | GGGATCACCCATTTGTTTGGGACAGTTAGTTACGCTCC |
| | | | GAAGTTCCAGGGC |
| 245 | 3911 | 215 | ARDAYEVWTGSYLPPFDY |
| 245 | 3912 | 216 | GCGAGAGATGCTTACGAGGTGTGGACTGGTTCTTATC |
| | | | TCCCCCCTTTTGACTAC |
| 245 | 3913 | 217 | GAAACGACACTCACGCAGTCTCCAGGCACCCTGTCTT |
| | | | TGTCTCCCGGGGAAAGAGCCACCCTCTCTTGCAGGGC |
| | | | CAGTCAGACTGTTACAAGCAACTACTTAGCCTGGTAC |
| | | | CAGCAGAAACCTGGCCAGGCTCCCAGGCTCCTCATCT |
| | | | ATGATGCACTCACCAGGGCCACTGGCATCCCAGACAG |
| | | | GTTCAGTGGCAGTGGGTCTGGGACAGACTTCACTCTC |
| | | | ACCATCAGCAGACTGGAGCCTGAAGATTTTGCACTTT |
| | | | ATTATTGTCAGCAGTATGGTAGTTCATTCCTCACTTTC |
| | | | GGCGGAGGGACCAAAGTGGATATCAAA |
| 245 | 3914 | 218 | ETTLTQSPGTLSLSPGERATLSCRASQTVTSNYLAWYQQ |
| | | | KPGQAPRLLIYDALTRATGIPDRFSGSGSGTDFTLTISRLE |
| | | | PEDFALYYCQQYGSSFLTFGGGTKVDIK |
| 245 | 3915 | 219 | RASQTVTSNYLA |
| 245 | 3916 | 220 | AGGGCCAGTCAGACTGTTACAAGCAACTACTTAGCC |
| 245 | 3917 | 221 | DALTRAT |
| 245 | 3918 | 222 | GATGCACTCACCAGGGCCACT |
| 245 | 3919 | 223 | QQYGSSFLT |
| 245 | 3920 | 224 | CAGCAGTATGGTAGTTCATTCCTCACT |
| 246 | 3921 | 225 | CAGGTGCAGCTGCAGGAGTCCGGGGCTGAGGTGAAG |
| | | | AAGCCTGGGTCCTCGGTGAAGGTCTCCTGCAAGGCTT |
| | | | CTGGAGGCGCCTTCAGCAGCTATGCTATCAGCTGGGT |
| | | | GCGACAGGCCCCTGGACAGGGCCTCGAGTGGCTGGGA |
| | | | GGGATCACCCATTTGTTTGGGACAGTTAGTTACGCTCC |
| | | | GAAGTTCCAGGGCAGAGTCACCATCACCGCGGACGCA |
| | | | TCCACGGGCACACTTTACATGGTGTTGAACAGCCTGA |
| | | | AACCTGAGGACACGGCCATTTATTATTGTGCGAGAGA |
| | | | TGCTTACGAGGTGTGGACTGGTTCTTATCTCCCCCCTT |
| | | | TTGACTACTGGGGCCAGGGAACCCTGGTCACCGTCTC |
| | | | CTCA |
| 246 | 3922 | 226 | QVQLQESGAEVKKPGSSVKVSCKASGGAFSSYAISWVR |
| | | | QAPGQGLEWLGGITHLFGTVSYAPKFQGRVTITADASTG |
| | | | TLYMVLNSLKPEDTAIYYCARDAYEVWTGSYLPPFDYW |
| | | | GQGTLVTVSS |
| 246 | 3923 | 227 | GAFSSYAIS |
| 246 | 3924 | 228 | GGCGCCTTCAGCAGCTATGCTATCAGC |
| 246 | 3925 | 229 | GITHLFGTVSYAPKFQG |
| 246 | 3926 | 230 | GGGATCACCCATTTGTTTGGGACAGTTAGTTACGCTCC |
| | | | GAAGTTCCAGGGC |
| 246 | 3927 | 231 | ARDAYEVWTGSYLPPFDY |
| 246 | 3928 | 232 | GCGAGAGATGCTTACGAGGTGTGGACTGGTTCTTATC |
| | | | TCCCCCCTTTTGACTAC |
| 246 | 3929 | 233 | GAAATTGTATTGACACAGTCTCCAGGCACCCTGTCTTT |
| | | | GTCTCCCGGGGAAAGAGCCACCCTCTCTTGCAGGGCC |
| | | | AGTCAGACTGTTACAAGCAACTACTTAGCCTGGTACC |
| | | | AGCAGAAACCTGGCCAGGCTCCCAGGCTCCTCATCTA |
| | | | TGATGCACTCACCAGGGCCACTGGCATCCCAGACAGG |
| | | | TTCAGTGGCAGTGGGTCTGGGACAGACTTCACTCTCA |
| | | | CCATCAGCAGACTGGAGCCTGAAGATTTTGCACTTTA |
| | | | TTATTGTCAGCAGTATGGTAGTTCATTCCTCACTTTCG |
| | | | GCGGAGGGACCAAGCTGGAGATCAAA |
| 246 | 3930 | 234 | EIVLTQSPGTLSLSPGERATLSCRASQTVTSNYLAWYQQ |
| | | | KPGQAPRLLIYDALTRATGIPDRFSGSGSGTDFTLTISRLE |
| | | | PEDFALYYCQQYGSSFLTFGGGTKLEIK |
| 246 | 3931 | 235 | RASQTVTSNYLA |
| 246 | 3932 | 236 | AGGGCCAGTCAGACTGTTACAAGCAACTACTTAGCC |
| 246 | 3933 | 237 | DALTRAT |
| 246 | 3934 | 238 | GATGCACTCACCAGGGCCACT |
| 246 | 3935 | 239 | QQYGSSFLT |
| 246 | 3936 | 240 | CAGCAGTATGGTAGTTCATTCCTCACT |
| 247 | 3937 | 241 | CAGGTCCAGCTGGTACAGTCTGGAGCTGAGGTGAAGG |
| | | | AGCCTGGGGCCTCAGTGAGGGTCTCCTGCAAGGCTTC |
| | | | TGGTTACACCTTTACCAGCTATGGTATCAGCTGGGTGC |
| | | | GACAGGCCCCTGGACAAGGGCTTGAGTGGATGGGATG |
| | | | GATCAGCGCTTACAATGGTAACACAAACTATGCACAG |
| | | | AAGTTCCAGGGCAGAGTCACCGTGACCACAGACACAT |
| | | | CCACGAGCGCAGCCTACATGGAGCTGAGGAGCCTGAG |
| | | | ATCTGACGACACGGCCATTTATTACTGTGCGAGAGAT |
| | | | TCATTTTCACTGACTGGTGCTGGATTTCCTGACTACTG |
| | | | GGGCCAGGGAACCCTGGTCACCGTCTCCTCA |
| 247 | 3938 | 242 | QVQLVQSGAEVKEPGASVRVSCKASGYTFTSYGISWVR |
| | | | QAPGQGLEWMGWISAYNGNTNYAQKFQGRVTVTTDTS |
| | | | TSAAYMELRSLRSDDTAIYYCARDSFSLTGAGFPDYWG |
| | | | QGTLVTVSS |
| 247 | 3939 | 243 | YTFTSYGIS |
| 247 | 3940 | 244 | TACACCTTTACCAGCTATGGTATCAGC |
| 247 | 3941 | 245 | WISAYNGNTNYAQKFQG |
| 247 | 3942 | 246 | TGGATCAGCGCTTACAATGGTAACACAAACTATGCAC |
| | | | AGAAGTTCCAGGGC |
| 247 | 3943 | 247 | ARDSFSLTGAGFPDY |
| 247 | 3944 | 248 | GCGAGAGATTCATTTTCACTGACTGGTGCTGGATTTCC |
| | | | TGACTAC |
| 247 | 3945 | 249 | GAAATTGTAATGACGCAGTCTCCACTCTCCCTGCCCGT |
| | | | CACCCTTGGACAGCCGGCCTCCATCTCCTGCAGGTCTA |
| | | | GTCAAAGCCTCGTATACAGTGATGGAAACACCTACTT |
| | | | GAATTGGTTTCAGCAGAGGCCAGGCCAATCTCCAAGG |
| | | | CGCCTAATTTATAAGGTTTCTAACCGGGACTCTGGGGT |
| | | | CCCAGACAGATTCAGCGGCAGTGGGTCAGACACTGAT |
| | | | TTCACACTGAAAATCAGCAGGGTGGAGGCTGAGGATG |
| | | | TTGGGGTTTATTACTGCATGCAAGCTACACAGTGGCCT |
| | | | CGCACGTTCGGCCAAGGGACCAAGGTGGAAATCAAA |
| 247 | 3946 | 250 | EIVMTQSPLSLPVTLGQPASISCRSSQSLVYSDGNTYLNW |
| | | | FQQRPGQSPRRLIYKVSNRDSGVPDRFSGSGSDTDFTLKI |
| | | | SRVEAEDVGVYYCMQATQWPRTFGQGTKVEIK |
| 247 | 3947 | 251 | RSSQSLVYSDGNTYLN |
| 247 | 3948 | 252 | AGGTCTAGTCAAAGCCTCGTATACAGTGATGGAAACA |
| | | | CCTACTTGAAT |
| 247 | 3949 | 253 | KVSNRDS |
| 247 | 3950 | 254 | AAGGTTTCTAACCGGGACTCT |
| 247 | 3951 | 255 | MQATQWPRT |
| 247 | 3952 | 256 | ATGCAAGCTACACAGTGGCCTCGCACG |
| 248 | 3953 | 257 | GAGGTGCAGCTGTTGGAGTCTGGGGGAGGCCTGGTCA |
| | | | AGCCTGGGGGGTCCCTGAGACTCTCCTGTGTAGCCTCT |
| | | | GGATTCACCTTCAGTAGCTATAACATCAACTGGGTCC |
| | | | GCCAGGCTCCAGGGAAGGGACTGGAGTGGGTCTCATC |
| | | | CATTAGTGGTGGTAGTAATTACATAGACTACGCAGAC |
| | | | TCAGTGAAGGGCCGATTCACCATCTCCAGAGACAACG |
| | | | CCAAGAACTCACTGTATTTGCAAATGAACAACCTGCG |
| | | | AGCCGAAGACACGGCTGTGTATTACTGTGCGAGACTT |
| | | | GGCTATGGTGGTAACCCGGAGCTTGACTATTGGGGCC |
| | | | AGGGAACCCTGGTCACTGTCTCCTCA |
| 248 | 3954 | 258 | EVQLLESGGGLVKPGGSLRLSCVASGFTFSSYNINWVRQ |
| | | | APGKGLEWVSSISGGSNYIDYADSVKGRFTISRDNAKNS |
| | | | LYLQMNNLRAEDTAVYYCARLGYGGNPELDYWGQGTL |
| | | | VTVSS |
| 248 | 3955 | 259 | FTFSSYNIN |
| 248 | 3956 | 260 | TTCACCTTCAGTAGCTATAACATCAAC |
| 248 | 3957 | 261 | SISGGSNYIDYADSVKG |
| 248 | 3958 | 262 | TCCATTAGTGGTGGTAGTAATTACATAGACTACGCAG |
| | | | ACTCAGTGAAGGGC |
| 248 | 3959 | 263 | ARLGYGGNPELDY |
| 248 | 3960 | 264 | GCGAGACTTGGCTATGGTGGTAACCCGGAGCTTGACT |
| | | | AT |
| 248 | 3961 | 265 | CAGTCTGTGCTGACGCAGCCGCCCTCAGTGTCTGGGG |
| | | | CCCCAGGACAGAGGGTCACCATCTCCTGCACCGGGAG |
| | | | CAGCTCCAACATCGGGGCAGGTTATGATGTACACTGG |
| | | | TACCAGCAACGTCCAGGAACAGCCCCCAAACTCCTCA |
| | | | TCTATGCTAATAACAATCGGCCCTCAGGGGTCCCTGA |
| | | | CCGATTCTCTGGCTCCAAGTCTGGCACCTCAGCCTCCC |
| | | | TGGCCATCACTGGGCTCCAGGCTGAGGATGAGGCTGA |
| | | | TTATTACTGCCAGTCCTATGACCTCAGTCTGAGTAGTT |
| | | | CGAGGGTATTCGGCGGAGGGACCAAGCTGACCGTCCT |
| | | | C |
| 248 | 3962 | 266 | QSVLTQPPSVSGAPGQRVTISCTGSSSNIGAGYDVHWYQ |
| | | | QRPGTAPKLLIYANNNRPSGVPDRFSGSKSGTSASLAITG |
| | | | LQAEDEADYYCQSYDLSLSSSRVFGGGTKLTVL |
| 248 | 3963 | 267 | TGSSSNIGAGYDVH |
| 248 | 3964 | 268 | ACCGGGAGCAGCTCCAACATCGGGGCAGGTTATGATG |
| | | | TACAC |
| 248 | 3965 | 269 | ANNNRPS |
| 248 | 3966 | 270 | GCTAATAACAATCGGCCCTCA |
| 248 | 3967 | 271 | QSYDLSLSSSRV |
| 248 | 3968 | 272 | CAGTCCTATGACCTCAGTCTGAGTAGTTCGAGGGTA |
| 249 | 3969 | 273 | CAGGTCCAGCTGGTGCAGTCTGGGGGAGGCGTGGTCC |
| | | | AGCCTGGGAGGTCCCTGAAACACTCATGTGCAGCCTC |
| | | | TGGATTCACCTTCAATAACTATGCTATACACTGGGTCC |
| | | | GCCAGGCTCCAGGCAAGGGCCTGGAGTGGGTGGCAG |
| | | | CTATCTCATATGATGGAAGCAATGAATACTACTCAAA |
| | | | CTCCGTGAAGGGCCGATTCACCATCTCCAGAGACAAT |
| | | | TCCAAGTACACGCTGTATCTGCAAATGAACAGCCTGA |
| | | | GACCTGAGGACACGGCTGTGTATTACTGTGCGAGAGG |
| | | | CGCCTCCTATTACTATGTGAGTAGTGACCTTGGCTACT |
| | | | GGGGCCAGGGAACCCTGGTCACCGTCTCCTCA |
| 249 | 3970 | 274 | QVQLVQSGGGVVQPGRSLKHSCAASGFTFNNYAIHWVR |
| | | | QAPGKGLEWVAAISYDGSNEYYSNSVKGRFTISRDNSK |
| | | | YTLYLQMNSLRPEDTAVYYCARGASYYYVSSDLGYWG |
| | | | QGTLVTVSS |
| 249 | 3971 | 275 | FTFNNYAIH |
| 249 | 3972 | 276 | TTCACCTTCAATAACTATGCTATACAC |
| 249 | 3973 | 277 | AISYDGSNEYYSNSVKG |
| 249 | 3974 | 278 | GCTATCTCATATGATGGAAGCAATGAATACTACTCAA |
| | | | ACTCCGTGAAGGGC |
| 249 | 3975 | 279 | ARGASYYYVSSDLGY |
| 249 | 3976 | 280 | GCGAGAGGCGCCTCCTATTACTATGTGAGTAGTGACC |
| | | | TTGGCTAC |
| 249 | 3977 | 281 | CAGCCTGTGCTGACTCAGCCGCCCTCAGTGTCTGGGG |
| | | | CCCCAGGGCAGAGGGTCACCATCTCCTGCACTGGGAG |
| | | | CAGCTCCAACATCGGGTCAGGTTATGATGTGCACTGG |
| | | | TATCAGCAGCTTCCAGGAACAGCCCCCAAAGTCGTCA |
| | | | TCTATGGTAACATCAATCGGCCCTCAGGGGTCCCTGA |
| | | | GCGATTCTCTGGCTCCAAGTCTGGCACCTCAGCCTCCC |
| | | | TGGCCATCACTGGGCTCCAGGCTGAGGATGAGGCTGA |
| | | | TTATTACTGCCAGTCCTATGACAGCCTGAGTGCCTCTT |
| | | | GGGTGTTCGGCGGAGGGACCAAGCTCACCGTCCTA |
| 249 | 3978 | 282 | QPVLTQPPSVSGAPGQRVTISCTGSSSNIGSGYDVHWYQ |
| | | | QLPGTAPKVVIYGNINRPSGVPERFSGSKSGTSASLAITG |
| | | | LQAEDEADYYCQSYDSLSASWVFGGGTKLTVL |
| 249 | 3979 | 283 | TGSSSNIGSGYDVH |
| 249 | 3980 | 284 | ACTGGGAGCAGCTCCAACATCGGGTCAGGTTATGATG |
| | | | TGCAC |
| 249 | 3981 | 285 | GNINRPS |
| 249 | 3982 | 286 | GGTAACATCAATCGGCCCTCA |
| 249 | 3983 | 287 | QSYDSLSASWV |
| 249 | 3984 | 288 | CAGTCCTATGACAGCCTGAGTGCCTCTTGGGTG |
| 250 | 3985 | 289 | CAGGTCCAGCTTGTGCAGTCTGGACCAGAGGTGAAAA |
| | | | AGACCAGAGAGTCTCTGAAGATCTACTGTAAGGGTTC |
| | | | TGGATACAGCTTTATCAGCCACTGGATCGGCTGGGTG |
| | | | CGCCAGAAACCCGGGAAAGGCCTGGAGTGGATGGGG |
| | | | ATCATCTATCCGGGTGACTCTGACACCAGATACAGCC |
| | | | CGTCCTTCCAAGGCCAGGTCGCCATCTCAGCCGACAA |
| | | | GTCCATCAACACCGCCTACCTGCAGTGGAGCAGCCTG |
| | | | AAGTCCTCGGACACCGCCATATATTACTGTGCGAGTG |
| | | | TAATGCTTCGGGGGATTATGTGGGGCCAGGGAACCCT |
| | | | GGTCACCGTCTCCTCA |
| 250 | 3986 | 290 | QVQLVQSGPEVKKTRESLKIYCKGSGYSFISHWIGWVRQ |
| | | | KPGKGLEWMGIIYPGDSDTRYSPSFQGQVAISADKSINT |
| | | | AYLQWSSLKSSDTAIYYCASVMLRGIMWGQGTLVTVSS |
| 250 | 3987 | 291 | YSFISHWIG |
| 250 | 3988 | 292 | TACAGCTTTATCAGCCACTGGATCGGC |
| 250 | 3989 | 293 | IIYPGDSDTRYSPSFQG |
| 250 | 3990 | 294 | ATCATCTATCCGGGTGACTCTGACACCAGATACAGCC |
| | | | CGTCCTTCCAAGGC |
| 250 | 3991 | 295 | ASVMLRGIM |
| 250 | 3992 | 296 | GCGAGTGTAATGCTTCGGGGGATTATG |
| 250 | 3993 | 297 | GACATCCGGTTGACCCAGTCTCCATCCTCCCTGTCTGC |
| | | | ATCTGTAGGAGACAGAGTCACCATCACTTGCCAGGCG |
| | | | AGTCAGGACATTAGCAAGTATCTAAATTGGTATCAGC |
| | | | AGAAACCAGGGAAAGCCCCTAAGCTCCTGATCTACGA |
| | | | TGCATCCAATTTGGAAACAGGGGTCCCATCAAGATTC |
| | | | AGTGGAAGTGGATCTGGGACAGATTTTACTTTCACCA |
| | | | TCAGCAGCCTGCAGCCTGAAGATATTGCAACATATTA |
| | | | CTGTCAGCCGTATGATAATCTCCCTCCGCCGCTCACTT |
| | | | TCGGCGGAGGGACCAAGCTGGAGATCAAA |
| 250 | 3994 | 298 | DIRLTQSPSSLSASVGDRVTITCQASQDISKYLNWYQQKP |
| | | | GKAPKLLIYDASNLETGVPSRFSGSGSGTDFTFTISSLQPE |
| | | | DIATYYCQPYDNLPPPLTFGGGTKLEIK |
| 250 | 3995 | 299 | QASQDISKYLN |
| 250 | 3996 | 300 | CAGGCGAGTCAGGACATTAGCAAGTATCTAAAT |
| 250 | 3997 | 301 | DASNLET |
| 250 | 3998 | 302 | GATGCATCCAATTTGGAAACA |
| 250 | 3999 | 303 | QPYDNLPPPLT |
| 250 | 4000 | 304 | CAGCCGTATGATAATCTCCCTCCGCCGCTCACT |
| 251 | 4001 | 305 | GAGGTGCAGCTGTTGGAGTCTGGGGGAGGCGTGGTCC |
| | | | AGTCTGGGAGGTCCCTGAGACTCTCCTGTGCAGCGTC |
| | | | TGGATTCACCTTCAGTGACAATGGCATGCACTGGGTC |
| | | | CGCCAGGCTCCAGGCAAGGGGCTGGAGTGGGTGGCA |
| | | | GGTATATTTTATGATGGAAGTAATAAACAATATGCAG |
| | | | ACTCCGTGAAGGGCCGATTCACCATCTCCAGAGACAA |
| | | | TTCCAAGAGCACGCTGTATCTGCAAATGAACAGCCTG |
| | | | AGAGCCGAGGACACGGCTGTGTATTACTGTGCGAGAG |
| | | | CCCCTTACGATATTTGGAGTGGTTATTGTCTTGACTAC |
| | | | TGGGGCCAGGGAACCCTGGTCACCGTCTCCTCA |
| 251 | 4002 | 306 | EVQLLESGGGVVQSGRSLRLSCAASGFTFSDNGMHWVR |
| | | | QAPGKGLEWVAGIFYDGSNKQYADSVKGRFTISRDNSK |
| | | | STLYLQMNSLRAEDTAVYYCARAPYDIWSGYCLDYWG |
| | | | QGTLVTVSS |
| 251 | 4003 | 307 | FTFSDNGMH |
| 251 | 4004 | 308 | TTCACCTTCAGTGACAATGGCATGCAC |
| 251 | 4005 | 309 | GIFYDGSNKQYADSVKG |
| 251 | 4006 | 310 | GGTATATTTTATGATGGAAGTAATAAACAATATGCAG |
| | | | ACTCCGTGAAGGGC |
| 251 | 4007 | 311 | ARAPYDIWSGYCLDY |
| 251 | 4008 | 312 | GCGAGAGCCCCTTACGATATTTGGAGTGGTTATTGTCT |
| | | | TGACTAC |
| 251 | 4009 | 313 | GACATCCAGATGACTCAGACTCCAGCCACCCTGTCTA |
| | | | TGTCTCCAGGGGAAAGAGCCACCCTCTCCTGCAGGGC |
| | | | CAGTCAGAGTGTTAACAACAACTTAGCCTGGTACCAG |
| | | | CAGAGACCTGGCCAGGCTCCCAGGCTCCTCATCTATG |
| | | | GTGCATCTACCAGGGCCACTGGTATCCCAGCCAGGTT |
| | | | CAGTGGCAGTGGGTCTGAGACAGAGTTCACTCTCACT |
| | | | ATCAGCAGCCTGCAGTCTGAAGATTTTGCGGTTTATCA |
| | | | CTGTCAGCAGTATAGTATCTGGCCTCAGACTTTTGGCC |
| | | | AGGGGACCAAGCTGGAGATCAAA |
| 251 | 4010 | 314 | DIQMTQTPATLSMSPGERATLSCRASQSVNNNLAWYQQ |
| | | | RPGQAPRLLIYGASTRATGIPARFSGSGSETEFTLTISSLQ |
| | | | SEDFAVYHCQQYSIWPQTFGQGTKLEIK |
| 251 | 4011 | 315 | RASQSVNNNLA |
| 251 | 4012 | 316 | AGGGCCAGTCAGAGTGTTAACAACAACTTAGCC |
| 251 | 4013 | 317 | GASTRAT |
| 251 | 4014 | 318 | GGTGCATCTACCAGGGCCACT |
| 251 | 4015 | 319 | QQYSIWPQT |
| 251 | 4016 | 320 | CAGCAGTATAGTATCTGGCCTCAGACT |
| 252 | 4017 | 321 | GAGGTGCAGCTGGTGGAGTCTGGGGGAGGCTTGGTCC |
| | | | AGCCTGGGGGGTCCCTGAGACTCTCCTGTGCAGCCTC |
| | | | TGGATTCACTATTGGAACGTACTGGATGAGCTGGGTC |
| | | | CGCCAGGCTCCAGGGAAGGGGCTGGAGTGGGTGGCC |
| | | | AACATAAAACCAGATGGAAGTGAGCAATATTATGGG |
| | | | GACTCGGTGAAGGGCCGATTCACCATCTCCAGAGACA |
| | | | ACGCCAAGAATTCCCTGTATCTGCAAATGCACAGCCT |
| | | | GAGAGCCGAGGACGCGGCTGTCTTTTACTGTGCGAGG |
| | | | GATACTCCCGACGTATTACGACATTTGGAGTGGCCCC |
| | | | CTGTAGGTGCTTTTGATATCTGGGGCCAAGGGACCAC |
| | | | GGTCACCGTCTCCTCA |
| 252 | 4018 | 322 | EVQLVESGGGLVQPGGSLRLSCAASGFTIGTYWMSWVR |
| | | | QAPGKGLEWVANIKPDGSEQYYGDSVKGRFTISRDNAK |
| | | | NSLYLQMHSLRAEDAAVFYCARDTPDVLRHLEWPPVG |
| | | | AFDIWGQGTTVTVSS |
| 252 | 4019 | 323 | FTIGTYWMS |
| 252 | 4020 | 324 | TTCACTATTGGAACGTACTGGATGAGC |
| 252 | 4021 | 325 | NIKPDGSEQYYGDSVKG |
| 252 | 4022 | 326 | AACATAAAACCAGATGGAAGTGAGCAATATTATGGG |
| | | | GACTCGGTGAAGGGC |
| 252 | 4023 | 327 | ARDTPDVLRHLEWPPVGAFDI |
| 252 | 4024 | 328 | GCGAGGGATACTCCCGACGTATTACGACATTTGGAGT |
| | | | GGCCCCCTGTAGGTGCTTTTGATATC |
| 252 | 4025 | 329 | GAAATTGTAATGACGCAGTCTCCAGACTCCCTGGCTG |
| | | | TGTCTCTGGGCGAGAGGGCCACCATCAACTGCAAGTC |
| | | | CAGCCAGAGTCTTTTCTACAGCTCCACCAATCAGCACT |
| | | | ACTTGGCTTGGTACCAGCAGAAACCAGGACAGCCTCC |
| | | | TGAGCTGCTCATTTACTGGGCATCTATCCGGGAATCCG |
| | | | GGGTCCCTGACCGATTCAGTGGCAGCGGGTCTGGGAC |
| | | | AGATTTCACTCTCACCATCAGCAGCCTGCAGGCCGCA |
| | | | GATGTGGCAGTTTATTACTGTCAGCAGTATTATAGTAG |
| | | | TCCTCAAACTTTTGGCCAGGGGACCAAGGTGGAAATC |
| | | | AAA |
| 252 | 4026 | 330 | EIVMTQSPDSLAVSLGERATINCKSSQSLFYSSTNQHYLA |
| | | | WYQQKPGQPPELLIYWASIRESGVPDRFSGSGSGTDFTL |
| | | | TISSLQAADVAVYYCQQYYSSPQTFGQGTKVEIK |
| 252 | 4027 | 331 | KSSQSLFYSSTNQHYLA |
| 252 | 4028 | 332 | AAGTCCAGCCAGAGTCTTTTCTACAGCTCCACCAATC |
| | | | AGCACTACTTGGCT |
| 252 | 4029 | 333 | WASIRES |
| 252 | 4030 | 334 | TGGGCATCTATCCGGGAATCC |
| 252 | 4031 | 335 | QQYYSSPQT |
| 252 | 4032 | 336 | CAGCAGTATTATAGTAGTCCTCAAACT |
| 253 | 4033 | 337 | CAGGTCCAGCTTGTGCAGTCTGGAACTGAGGTGAAGA |
| | | | AGCCTGGGGCCTCAGTGAAGGTCTCCTGTAAGGCTGC |
| | | | TGGTTACACCTTTAGCAACTACGGTGTCAGTTGGGTGC |
| | | | GACAGGCCCCTGGACAGGGGCTTGAGTGGATGGGATG |
| | | | GATCAGCGCTTATAATGGTAACACAAAATTTGCACAG |
| | | | AAGGTCCAGGGCAGACTCACCATGACCACAGACACAT |
| | | | CTACCAGCACAGCCTACATGGAATTGAGGAACCTCAG |
| | | | ATCTGACGACACGGCCGTGTATTATTGTGCGAGAGAA |
| | | | TCAGGGGCAACAGCGGCTGCTATGTTTGACTACTGGG |
| | | | GCCAGGGAACCCTGGTCACCGTCTCCTCA |
| 253 | 4034 | 338 | QVQLVQSGTEVKKPGASVKVSCKAAGYTFSNYGVSWV |
| | | | RQAPGQGLEWMGWISAYNGNTKFAQKVQGRLTMTTDT |
| | | | STSTAYMELRNLRSDDTAVYYCARESGATAAAMFDYW |
| | | | GQGTLVTVSS |
| 253 | 4035 | 339 | YTFSNYGVS |
| 253 | 4036 | 340 | TACACCTTTAGCAACTACGGTGTCAGT |
| 253 | 4037 | 341 | WISAYNGNTKFAQKVQG |
| 253 | 4038 | 342 | TGGATCAGCGCTTATAATGGTAACACAAAATTTGCAC |
| | | | AGAAGGTCCAGGGC |
| 253 | 4039 | 343 | ARESGATAAAMFDY |
| 253 | 4040 | 344 | GCGAGAGAATCAGGGGCAACAGCGGCTGCTATGTTTG |
| | | | ACTAC |
| 253 | 4041 | 345 | GAAATTGTATTGACGCAGTCTCCACTCTCCCTGCCCGT |
| | | | CACCCTTGGACAGCCGGCCTCCATCTCCTGCAGGTCTA |
| | | | GTCAAAGCCTCGAATACAGTGATGGAAACATCTACTT |
| | | | GAGTTGGTTTCAACAGAGGCCAGGCCAATCTCCAAGG |
| | | | CGCCTAATTTATAAGGTTTCTCACCGGGACTCTGGGGT |
| | | | CCCAGACAGATTCAGCGGCAGTGGGTCAGGCACTGAT |
| | | | TTCACACTGAAAATCGCCAGGGTGGAGGCTGAGGATG |
| | | | TTGCAGTTTATTACTGCATGCAAGCTATACACTGGCCT |
| | | | CGAACTTTTGGCCAGGGGACCAAGGTGGAGATCAAA |
| 253 | 4042 | 346 | EIVLTQSPLSLPVTLGQPASISCRSSQSLEYSDGNIYLSWF |
| | | | QQRPGQSPRRLIYKVSHRDSGVPDRFSGSGSGTDFTLKIA |
| | | | RVEAEDVAVYYCMQAIHWPRTFGQGTKVEIK |
| 253 | 4043 | 347 | RSSQSLEYSDGNIYLS |
| 253 | 4044 | 348 | AGGTCTAGTCAAAGCCTCGAATACAGTGATGGAAACA |
| | | | TCTACTTGAGT |
| 253 | 4045 | 349 | KVSHRDS |
| 253 | 4046 | 350 | AAGGTTTCTCACCGGGACTCT |
| 253 | 4047 | 351 | MQAIHWPRT |
| 253 | 4048 | 352 | ATGCAAGCTATACACTGGCCTCGAACT |
| 254 | 4049 | 353 | GAGGTGCAGCTGGTGGAGTCTGGGGGAGGCGTGGTCC |
| | | | AGTCTGGGAGGTCCCTGAGACTCTCCTGTGCAGCGTC |
| | | | TGGATTCACCTTCAGTGACAATGGCATGCACTGGGTC |
| | | | CGCCAGGCTCCAGGCAAGGGGCTGGAGTGGGTGGCA |
| | | | GGTATATTTTATGATGGAAGTAATAAACAATATGCAG |
| | | | ACTCCGTGAAGGGCCGATTCACCATCTCCAGAGACAA |
| | | | TTCCAAGAGCACGCTGTATCTGCAAATGAACAGCCTG |
| | | | AGAGCCGAGGACACGGCTGTGTATTACTGTGCGAGAG |
| | | | CCCCTTACGATATTTGGAGTGGTTATTGTCTTGACTAC |
| | | | TGGGGCCAGGGAACCCTGGTCACCGTCTCCTCA |
| 254 | 4050 | 354 | EVQLVESGGGVVQSGRSLRLSCAASGFTFSDNGMHWVR |
| | | | QAPGKGLEWVAGIFYDGSNKQYADSVKGRFTISRDNSK |
| | | | STLYLQMNSLRAEDTAVYYCARAPYDIWSGYCLDYWG |
| | | | QGTLVTVSS |
| 254 | 4051 | 355 | FTFSDNGMH |
| 254 | 4052 | 356 | TTCACCTTCAGTGACAATGGCATGCAC |
| 254 | 4053 | 357 | GIFYDGSNKQYADSVKG |
| 254 | 4054 | 358 | GGTATATTTTATGATGGAAGTAATAAACAATATGCAG |
| | | | ACTCCGTGAAGGGC |
| 254 | 4055 | 359 | ARAPYDIWSGYCLDY |
| 254 | 4056 | 360 | GCGAGAGCCCCTTACGATATTTGGAGTGGTTATTGTCT |
| | | | TGACTAC |
| 254 | 4057 | 361 | GACATCCGGTTGACCCAGTCTCCAGCCACCCTGTCTAT |
| | | | GTCTCCAGGGGAAAGAGCCACCCTCTCCTGCAGGGCC |
| | | | AGTCAGAGTGTTAACAACAACTTAGCCTGGTACCAGC |
| | | | AGAGACCTGGCCAGGCTCCCAGGCTCCTCATCTATGG |
| | | | TGCATCTACCAGGGCCACTGGTATCCCAGCCAGGTTC |
| | | | AGTGGCAGTGGGTCTGAGACAGAGTTCACTCTCACTA |
| | | | TCAGCAGCCTGCAGTCTGAAGATTTTGCGGTTTATCAC |
| | | | TGTCAGCAGTATAGTATCTGGCCTCAGACTTTTGGCCA |
| | | | GGGGACCAAAGTGGATATCAAA |
| 254 | 4058 | 362 | DIRLTQSPATLSMSPGERATLSCRASQSVNNNLAWYQQR |
| | | | PGQAPRLLIYGASTRATGIPARFSGSGSETEFTLTISSLQSE |
| | | | DFAVYHCQQYSIWPQTFGQGTKVDIK |
| 254 | 4059 | 363 | RASQSVNNNLA |
| 254 | 4060 | 364 | AGGGCCAGTCAGAGTGTTAACAACAACTTAGCC |
| 254 | 4061 | 365 | GASTRAT |
| 254 | 4062 | 366 | GGTGCATCTACCAGGGCCACT |
| 254 | 4063 | 367 | QQYSIWPQT |
| 254 | 4064 | 368 | CAGCAGTATAGTATCTGGCCTCAGACT |
| 255 | 4065 | 369 | GAGGTGCAGCTGTTGGAGTCTGGGGGAGCCTTGGTCG |
| | | | AGCCTGGGGGGTCCCTGAGACTCTCCTGTGCAGCCTC |
| | | | TGGATTCTCCTTTAACACGTATTCCATGAACTGGGTCC |
| | | | GCCAGGGTCCAGGGAAGGGACTGGAGTGGGTCGCAA |
| | | | CGATAAGTACGAGTACTGCTGGCTCATACTACGCAGA |
| | | | CTCCGTGAGGGGCCGGTTCACCATCTCTAGAGACAAT |
| | | | TCCAAGAACACGTTATATCTGCAAATGAACAGTCTGA |
| | | | GAGTCGAAGACACGGCCGTATATTACTGTGCGAGAGA |
| | | | TCAGGAAGTGGAACTGATCGATGATGCTTTTGATTTCT |
| | | | GGGGCCGGGGGACAATGGTCACCGTCTCTTCA |
| 255 | 4066 | 370 | EVQLLESGGALVEPGGSLRLSCAASGFSFNTYSMNWVR |
| | | | QGPGKGLEWVATISTSTAGSYYADSVRGRFTISRDNSKN |
| | | | TLYLQMNSLRVEDTAVYYCARDQEVELIDDAFDFWGR |
| | | | GTMVTVSS |
| 255 | 4067 | 371 | FSFNTYSMN |
| 255 | 4068 | 372 | TTCTCCTTTAACACGTATTCCATGAAC |
| 255 | 4069 | 373 | TISTSTAGSYYADSVRG |
| 255 | 4070 | 374 | ACGATAAGTACGAGTACTGCTGGCTCATACTACGCAG |
| | | | ACTCCGTGAGGGGC |
| 255 | 4071 | 375 | ARDQEVELIDDAFDF |
| 255 | 4072 | 376 | GCGAGAGATCAGGAAGTGGAACTGATCGATGATGCTT |
| | | | TTGATTTC |
| 255 | 4073 | 377 | GATATTGTGATGACTCAGACACATTCCTCCCTGTCTGC |
| | | | ATCTGTGGGAGACAGAGTCACCATCACTTGCCGGGCC |
| | | | AGTCAGAGTATTAGTATCTGGGTGGCCTGGTATCAGC |
| | | | AGAAACCAGGGAAAGCCCCTAACCTCCTGATCTATAA |
| | | | GGCGTCTAGTTTACAAAGTGGGGTCCCATCAAGGTTC |
| | | | AGCGGCAGTGGATCTGGGACAGAATTCACTCTCACCA |
| | | | TCAGCAGCCTGCAGCCTGATGACTCTGCAACTTATTAC |
| | | | TGCCAACAGTATTACACCTATTACAGTTTTGGCCAGG |
| | | | GGACCAAGCTGGAGATCAAA |
| 255 | 4074 | 378 | DIVMTQTHSSLSASVGDRVTITCRASQSISIWVAWYQQK |
| | | | PGKAPNLLIYKASSLQSGVPSRFSGSGSGTEFTLTISSLQP |
| | | | DDSATYYCQQYYTYYSFGQGTKLEIK |
| 255 | 4075 | 379 | RASQSISIWVA |
| 255 | 4076 | 380 | CGGGCCAGTCAGAGTATTAGTATCTGGGTGGCC |
| 255 | 4077 | 381 | KASSLQS |
| 255 | 4078 | 382 | AAGGCGTCTAGTTTACAAAGT |
| 255 | 4079 | 383 | QQYYTYYS |
| 255 | 4080 | 384 | CAACAGTATTACACCTATTACAGT |
| 256 | 4081 | 385 | GAGGTGCAGCTGGTGGAGTCTGGGGCTGAGGTGAAG |
| | | | AGGCCTGGGGCCTCAGTGAAAATCTCCTGCAAGGCTT |
| | | | CTGAATACGCCTTCACCGCCCACTATCTTCACTGGGTG |
| | | | CGACAGGCCCCTGATCAAGGACTTGAGTGGATGGGAT |
| | | | GGATCAGCCCTAAAAGTGGTGGCACCAACTATGCACA |
| | | | GAAGTTTCACGGCAGGGTCAGCATGACCAGTGACACG |
| | | | TCCATCAGTACAGTCTATATGGAACTGAGCAGCCTGA |
| | | | CATCTGACGACACGGCCGTCTATTACTGTGCGAGAAG |
| | | | CAGTCTGGTGGGAGCAAGCCCCAACTTTGACTTCTGG |
| | | | GGCCAGGGAACCCTGGTCACCGTCTCCTCA |
| 256 | 4082 | 386 | EVQLVESGAEVKRPGASVKISCKASEYAFTAHYLHWVR |
| | | | QAPDQGLEWMGWISPKSGGTNYAQKFHGRVSMTSDTSI |
| | | | STVYMELSSLTSDDTAVYYCARSSLVGASPNFDFWGQG |
| | | | TLVTVSS |
| 256 | 4083 | 387 | YAFTAHYLH |
| 256 | 4084 | 388 | TACGCCTTCACCGCCCACTATCTTCAC |
| 256 | 4085 | 389 | WISPKSGGTNYAQKFHG |
| 256 | 4086 | 390 | TGGATCAGCCCTAAAAGTGGTGGCACCAACTATGCAC |
| | | | AGAAGTTTCACGGC |
| 256 | 4087 | 391 | ARSSLVGASPNFDF |
| 256 | 4088 | 392 | GCGAGAAGCAGTCTGGTGGGAGCAAGCCCCAACTTTG |
| | | | ACTTC |
| 256 | 4089 | 393 | CAGTCTGTGCTGACGCAGCCGCCCTCAGTGTCTGCGG |
| | | | CCCCAGGACAGAGGGTCACCATCTCCTGCTCTGGAAG |
| | | | CAGCTCCAACATTGGGAATAATTATGTATCCTGGTAC |
| | | | CAGCAACTCCCAGGAACTACCCCCAAAGTCCTCATTT |
| | | | ACGACAATAATCAGCGACCCTCAGGGATTCCTGACCG |
| | | | TTTCTCTGGCTCCAAGTCTGGCACGTCAGCCACCCTGG |
| | | | CCATCAGCGGACTCCAGACTGGCGACGAGGCCGTCTA |
| | | | TTATTGCGGAACATGGGATGCCAGCCTGAGTGCTGCT |
| | | | ATGGTTTTCGGCGGGGGGACCAAGCTCACCGTCCTA |
| 256 | 4090 | 394 | QSVLTQPPSVSAAPGQRVTISCSGSSSNIGNNYVSWYQQ |
| | | | LPGTTPKVLIYDNNQRPSGIPDRFSGSKSGTSATLAISGLQ |
| | | | TGDEAVYYCGTWDASLSAAMVFGGGTKLTVL |
| 256 | 4091 | 395 | SGSSSNIGNNYVS |
| 256 | 4092 | 396 | TCTGGAAGCAGCTCCAACATTGGGAATAATTATGTAT |
| | | | CC |
| 256 | 4093 | 397 | DNNQRPS |
| 256 | 4094 | 398 | GACAATAATCAGCGACCCTCA |
| 256 | 4095 | 399 | GTWDASLSAAMV |
| 256 | 4096 | 400 | GGAACATGGGATGCCAGCCTGAGTGCTGCTATGGTT |
| 257 | 4097 | 401 | CAGGTGCAGCTGCAGGAGTCGGGCCCAGGACTGGTGA |
| | | | AGCCTTCGGAGACCCTGTCCCTCACCTGCACTGTCTCT |
| | | | GGTGGCTCCATCAGCGGATATTACTGGAGCTGGATCC |
| | | | GGCAGCCCCCAGGGAGGGGACTGGAGTGGATTGGGTT |
| | | | TATTTATTATAGTGGGAGTACCAGCTACGACTCCTCCC |
| | | | TCAAGAGTCGAGTCACCATATCAGTAGACACGTCCAA |
| | | | GAACCAGTTCTCCCTAAACCTGAGCTCTGTGACCGCT |
| | | | GCGGACACGGCCGTATATTACTGTGCGAGAAGTACAT |
| | | | GGGACTACGGTGACCACTTTCCGTTTGACTACTGGGG |
| | | | CCAGGGAACCCTGGTCACCGTCTCCTCA |
| 257 | 4098 | 402 | QVQLQESGPGLVKPSETLSLTCTVSGGSISGYYWSWIRQ |
| | | | PPGRGLEWIGFIYYSGSTSYDSSLKSRVTISVDTSKNQFSL |
| | | | NLSSVTAADTAVYYCARSTWDYGDHFPFDYWGQGTLV |
| | | | TVSS |
| 257 | 4099 | 403 | GSISGYYWS |
| 257 | 4100 | 404 | GGCTCCATCAGCGGATATTACTGGAGC |
| 257 | 4101 | 405 | FIYYSGSTSYDSSLKS |
| 257 | 4102 | 406 | TTTATTTATTATAGTGGGAGTACCAGCTACGACTCCTC |
| | | | CCTCAAGAGT |
| 257 | 4103 | 407 | ARSTWDYGDHFPFDY |
| 257 | 4104 | 408 | GCGAGAAGTACATGGGACTACGGTGACCACTTTCCGT |
| | | | TTGACTAC |
| 257 | 4105 | 409 | TCCTATGAGCTGACTCAGCCACCCTCAGTGTCAGTGG |
| | | | CCCCAGGAAAGACGGCCAGGATTACCTGTGGGGGAA |
| | | | ACAACATTGGAATTAAAGATGTGCACTGGTACCAACT |
| | | | GAGGCCAGGCCAGGCCCCTGTGTTGGTCATCTCTTAT |
| | | | GATAGCGACCGGCCCTCAGGGATCCCTGAGCGATTCT |
| | | | CTGGCTCCAACTCTGGGAACACGGCCACCCTGACCAT |
| | | | CAGCAGGGTCGAAGCCGGGGATGAGGCCGACTATTTC |
| | | | TGTCAGGTGTGGGATAGTAGTCCTGATCATCCTTATGT |
| | | | CTTCGGAACTGGGACCAAGCTCACCGTCCTA |
| 257 | 4106 | 410 | SYELTQPPSVSVAPGKTARITCGGNNIGIKDVHWYQLRP |
| | | | GQAPVLVISYDSDRPSGIPERFSGSNSGNTATLTISRVEAG |
| | | | DEADYFCQVWDSSPDHPYVFGTGTKLTVL |
| 257 | 4107 | 411 | GGNNIGIKDVH |
| 257 | 4108 | 412 | GGGGGAAACAACATTGGAATTAAAGATGTGCAC |
| 257 | 4109 | 413 | YDSDRPS |
| 257 | 4110 | 414 | TATGATAGCGACCGGCCCTCA |
| 257 | 4111 | 415 | QVWDSSPDHPYV |
| 257 | 4112 | 416 | CAGGTGTGGGATAGTAGTCCTGATCATCCTTATGTC |
| 258 | 4113 | 417 | GAGGTGCAGCTGGTGGAGTCTGGAGGTGAGGTGAAG |
| | | | AAGCCTGGGGCCTCAGTGAAGGTCTCCTGCAGGGCCT |
| | | | CTGGTTACACCTTTAGAAACTATGGCCTCACCTGGGTG |
| | | | CGGCAGGCCCCCGGACAAGGGCTTGAGTGGATGGGAT |
| | | | GGATCAGCGCTTACAATGGAAACACAAACTATGCACA |
| | | | GAAGTTCCAGGGCAGAGTCACACTGACCACGGACACA |
| | | | TCCACGAGCACAGCCTACATGGAACTGAGGAGCCTAA |
| | | | GATCTGACGACACGGCCGTGTATTTCTGTGCGAGAGA |
| | | | CGTCCCCGGCCACGGCGCTGCCTTCATGGACGTCTGG |
| | | | GGCACAGGGACCACGGTCACCGTCTCCTCA |
| 258 | 4114 | 418 | EVQLVESGGEVKKPGASVKVSCRASGYTFRNYGLTWVR |
| | | | QAPGQGLEWMGWISAYNGNTNYAQKFQGRVTLTTDTS |
| | | | TSTAYMELRSLRSDDTAVYFCARDVPGHGAAFMDVWG |
| | | | TGTTVTVSS |
| 258 | 4115 | 419 | YTFRNYGLT |
| 258 | 4116 | 420 | TACACCTTTAGAAACTATGGCCTCACC |
| 258 | 4117 | 421 | WISAYNGNTNYAQKFQG |
| 258 | 4118 | 422 | TGGATCAGCGCTTACAATGGAAACACAAACTATGCAC |
| | | | AGAAGTTCCAGGGC |
| 258 | 4119 | 423 | ARDVPGHGAAFMDV |
| 258 | 4120 | 424 | GCGAGAGACGTCCCCGGCCACGGCGCTGCCTTCATGG |
| | | | ACGTC |
| 258 | 4121 | 425 | GAAACGACACTCACGCAGTCTCCACTCTCCCTGCCCG |
| | | | TCACCCTTGGGCAGCCGGCCTCCATCTCCTGCAGGTCT |
| | | | AGTCAAAGCCTCGAAGCCAGTGATACAAATATCTACT |
| | | | TGAGTTGGTTTCAGCAGAGGCCAGGCCAATCTCCAAG |
| | | | GCGCCTAATTTATAAGATTTCTAACCGAGACTCTGGG |
| | | | GTCCCAGACAGATTCAGCGGCAGTGGGTCAGGCACTC |
| | | | ATTTCACACTGAGAATCAGCAGGGTGGAGGCTGACGA |
| | | | TGTTGCGGTTTATTACTGCATGCAGGGTACACACTGGC |
| | | | CTCCGGCGTTCGGCCAGGGGACCAAGCTGGAGATCAA |
| | | | A |
| 258 | 4122 | 426 | ETTLTQSPLSLPVTLGQPASISCRSSQSLEASDTNIYLSWF |
| | | | QQRPGQSPRRLIYKISNRDSGVPDRFSGSGSGTHFTLRISR |
| | | | VEADDVAVYYCMQGTHWPPAFGQGTKLEIK |
| 258 | 4123 | 427 | RSSQSLEASDTNIYLS |
| 258 | 4124 | 428 | AGGTCTAGTCAAAGCCTCGAAGCCAGTGATACAAATA |
| | | | TCTACTTGAGT |
| 258 | 4125 | 429 | KISNRDS |
| 258 | 4126 | 430 | AAGATTTCTAACCGAGACTCT |
| 258 | 4127 | 431 | MQGTHWPPA |
| 258 | 4128 | 432 | ATGCAGGGTACACACTGGCCTCCGGCG |
| 259 | 4129 | 433 | GAGGTGCAGCTGGTGGAGTCTGGATCTGAGGTGAAGA |
| | | | AGCCTGGGGCCGCAGTGAAGGTATCCTGCAAGGCTTC |
| | | | TGGTTACATCTTTGCCAACTTTGGTGTCAGCTGGGTGC |
| | | | GACAGGCCCCTGGACAAGGGCTTGAGTGGATGGGATG |
| | | | GATCAGCGCTTACAATGGTAACACAAACTATGCACAG |
| | | | AAGTTCCAGGGCAGAGTCATCATGACCACAGACACAT |
| | | | CCACGAGCACAGCCTACATGGAGCTGAGGAGCCTGAG |
| | | | ATCTGACGACACGGCCGTGTATTATTGTGCGAGAGAC |
| | | | CCCCCCGCCTACGCCGCTACATTGATGGACGTCTGGG |
| | | | GCAAAGGGACCACGGTCACCGTCTCCTCA |
| 259 | 4130 | 434 | EVQLVESGSEVKKPGAAVKVSCKASGYIFANFGVSWVR |
| | | | QAPGQGLEWMGWISAYNGNTNYAQKFQGRVIMTTDTS |
| | | | TSTAYMELRSLRSDDTAVYYCARDPPAYAATLMDVWG |
| | | | KGTTVTVSS |
| 259 | 4131 | 435 | YIFANFGVS |
| 259 | 4132 | 436 | TACATCTTTGCCAACTTTGGTGTCAGC |
| 259 | 4133 | 437 | WISAYNGNTNYAQKFQG |
| 259 | 4134 | 438 | TGGATCAGCGCTTACAATGGTAACACAAACTATGCAC |
| | | | AGAAGTTCCAGGGC |
| 259 | 4135 | 439 | ARDPPAYAATLMDV |
| 259 | 4136 | 440 | GCGAGAGACCCCCCCGCCTACGCCGCTACATTGATGG |
| | | | ACGTC |
| 259 | 4137 | 441 | GATATTGTGATGACTCAGTCTCCACTCTCCCTGCCCGT |
| | | | CACCCTTGGACAGTCGGCCTCCATCTCCTGCAGGTCTA |
| | | | GTCAAAGCCTCGAACACAGTGATACAAACACCTACTT |
| | | | GACTTGGTATCAGCAGAGGCCAGGCCAATCTCCAAGG |
| | | | CGGCTACTTTATAAGGTTTCTAACCGGGACTCTGGGGT |
| | | | CCCAGACAGATTCAGCGGCAGTGGGTCAGGCACTGAT |
| | | | TTCACACTGAAAATCAGCAGGGTGGAGGCTGAGGATG |
| | | | TTGGGGTTTATTACTGCATGCAAGGTACACACTGGCCT |
| | | | CCGACGTTCGGCCAAGGGACCAAGCTGGAGATCAAA |
| 259 | 4138 | 442 | DIVMTQSPLSLPVTLGQSASISCRSSQSLEHSDTNTYLTW |
| | | | YQQRPGQSPRRLLYKVSNRDSGVPDRFSGSGSGTDFTLK |
| | | | ISRVEAEDVGVYYCMQGTHWPPTFGQGTKLEIK |
| 259 | 4139 | 443 | RSSQSLEHSDTNTYLT |
| 259 | 4140 | 444 | AGGTCTAGTCAAAGCCTCGAACACAGTGATACAAACA |
| | | | CCTACTTGACT |
| 259 | 4141 | 445 | KVSNRDS |
| 259 | 4142 | 446 | AAGGTTTCTAACCGGGACTCT |
| 259 | 4143 | 447 | MQGTHWPPT |
| 259 | 4144 | 448 | ATGCAAGGTACACACTGGCCTCCGACG |
| 260 | 4145 | 449 | GAGGTGCAGCTGGTGGAGTCTGGCCCAACACTGGTGA |
| | | | AGCCTTCGGAGACCCTGTCCCTCACCTGCGTTGTCTCT |
| | | | GGTGGCTCCGTCTACAGGAGTAGTAACTACTGGGCCT |
| | | | GGATCCGCCAGCCCCCAGGGAAGGGGCTGGAGTGGA |
| | | | TCGGGAGTGTCTATCATAGTGGGAACCCCTACTCCAA |
| | | | CCCGTCCCTTCAGAGTCGAGTCTCCGTCTCCATTGACA |
| | | | CGTCCAAGAACCAGTTCTCCCTGAAGCTGTACTCTGTG |
| | | | ACCGCCGCAGACTCGGCTATTTATTATTGTGCGTGTAA |
| | | | AAGAGCGGACGCTGACGACGTAGATTACGTGGCGGG |
| | | | CCTCACCGGTTTCCCCTGGTACTTCGATGTCTGGGGCC |
| | | | GTGGCACCCTGGTCACCGTCTCCTCA |
| 260 | 4146 | 450 | EVQLVESGPTLVKPSETLSLTCVVSGGSVYRSSNYWAWI |
| | | | RQPPGKGLEWIGSVYHSGNPYSNPSLQSRVSVSIDTSKN |
| | | | QFSLKLYSVTAADSAIYYCACKRADADDVDYVAGLTGF |
| | | | PWYFDVWGRGTLVTVSS |
| 260 | 4147 | 451 | GSVYRSSNYWA |
| 260 | 4148 | 452 | GGCTCCGTCTACAGGAGTAGTAACTACTGGGCC |
| 260 | 4149 | 453 | SVYHSGNPYSNPSLQS |
| 260 | 4150 | 454 | AGTGTCTATCATAGTGGGAACCCCTACTCCAACCCGT |
| | | | CCCTTCAGAGT |
| 260 | 4151 | 455 | ACKRADADDVDYVAGLTGFPWYFDV |
| 260 | 4152 | 456 | GCGTGTAAAAGAGCGGACGCTGACGACGTAGATTACG |
| | | | TGGCGGGCCTCACCGGTTTCCCCTGGTACTTCGATGTC |
| 260 | 4153 | 457 | GAAATTGTGTTGACGCAGTCTCCGTCCACCCTGTCTGC |
| | | | ATCTGTGGGAGACAGAGTCACCATCACTTGCCGGGCC |
| | | | AGTCAGAGTATTAGTAGTTGGTTGGCCTGGTATCAGC |
| | | | AGAAACCAGGGAAAACCCCTAAGTTGCTCATCTATAA |
| | | | GGCGTCTACTTTAGAAAGTGGGGTCCCATCAAGGTTC |
| | | | AGCGGCAGCGGATCTGGGACAGAATTCACTCTCACCA |
| | | | TCAGCAGCCTGCAGCCTGATGATTTCGCAACCTACTA |
| | | | CTGCCAACAGTATCATGTTTATTTCCCGCTCACTTTCG |
| | | | GCGGAGGGACCAAGGTGGAAATCAAA |
| 260 | 4154 | 458 | EIVLTQSPSTLSASVGDRVTITCRASQSISSWLAWYQQKP |
| | | | GKTPKLLIYKASTLESGVPSRFSGSGSGTEFTLTISSLQPD |
| | | | DFATYYCQQYHVYFPLTFGGGTKVEIK |
| 260 | 4155 | 459 | RASQSISSWLA |
| 260 | 4156 | 460 | CGGGCCAGTCAGAGTATTAGTAGTTGGTTGGCC |
| 260 | 4157 | 461 | KASTLES |
| 260 | 4158 | 462 | AAGGCGTCTACTTTAGAAAGT |
| 260 | 4159 | 463 | QQYHVYFPLT |
| 260 | 4160 | 464 | CAACAGTATCATGTTTATTTCCCGCTCACT |
| 261 | 4161 | 465 | GAGGTGCAGCTGGTGGAGTCTGGGGGAGGCGTGGTCC |
| | | | AGCCTGGGAGGTCCCTGAGACTCTCCTGTGTAGCGTC |
| | | | TGGATTCAGCTTCAGTATGCATGGCATGCACTGGGTC |
| | | | CGCCAGGCTCCAGGCAAGGGGCTGGAGTGGGTGACA |
| | | | GCTATATGGTATGATGGAAGTAATAAATATTATGCAG |
| | | | ACTCCGTGAAGGGCCGATTCACGATCTCCAGAGACAA |
| | | | TTCTAGGAACACGCTGTATCTGCAAATGAACAGCCTG |
| | | | AGAGCCGAGGACACGGCTGTGTATTACTGTGCGAGAG |
| | | | ATCATGCCTCAACTCCATACTACATGGACGTCTGGGG |
| | | | CAAAGGGACCACGGTCACCGTCTCTTCA |
| 261 | 4162 | 466 | EVQLVESGGGVVQPGRSLRLSCVASGFSFSMHGMHWV |
| | | | RQAPGKGLEWVTAIWYDGSNKYYADSVKGRFTISRDNS |
| | | | RNTLYLQMNSLRAEDTAVYYCARDHASTPYYMDVWG |
| | | | KGTTVTVSS |
| 261 | 4163 | 467 | FSFSMHGMH |
| 261 | 4164 | 468 | TTCAGCTTCAGTATGCATGGCATGCAC |
| 261 | 4165 | 469 | AIWYDGSNKYYADSVKG |
| 261 | 4166 | 470 | GCTATATGGTATGATGGAAGTAATAAATATTATGCAG |
| | | | ACTCCGTGAAGGGC |
| 261 | 4167 | 471 | ARDHASTPYYMDV |
| 261 | 4168 | 472 | GCGAGAGATCATGCCTCAACTCCATACTACATGGACG |
| | | | TC |
| 261 | 4169 | 473 | GAAACGACACTCACGCAGTCTCCAGGCACCCTGTCTT |
| | | | TGTCTCCAGGGGAAAGCGCCACCCTCTCCTGCAGGAC |
| | | | CAGTCAGAGGATTAGCAGCACCTACTTAGCCTGGTAC |
| | | | CGGCAGAAACCTGGCCAGGCTCCCAGGCTCCTCATGT |
| | | | ATGGTGCATCCAGCAGGGCCACTGGCATCCCGGACAG |
| | | | GTTCAGTGGCAGTGGGTCTGGGACAGACTTCACTCTC |
| | | | ACCATCAGCAGTCTGGAGCCTGAAGATTTTGCACTAT |
| | | | ATTACTGTCAGCAGTATGGTAGCTTTCCGTGGACGTTC |
| | | | GGCCAAGGGACCAAGGTGGAAATCAAA |
| 261 | 4170 | 474 | ETTLTQSPGTLSLSPGESATLSCRTSQRISSTYLAWYRQK |
| | | | PGQAPRLLMYGASSRATGIPDRFSGSGSGTDFTLTISSLEP |
| | | | EDFALYYCQQYGSFPWTFGQGTKVEIK |
| 261 | 4171 | 475 | RTSQRISSTYLA |
| 261 | 4172 | 476 | AGGACCAGTCAGAGGATTAGCAGCACCTACTTAGCC |
| 261 | 4173 | 477 | GASSRAT |
| 261 | 4174 | 478 | GGTGCATCCAGCAGGGCCACT |
| 261 | 4175 | 479 | QQYGSFPWT |
| 261 | 4176 | 480 | CAGCAGTATGGTAGCTTTCCGTGGACG |
| 262 | 4177 | 481 | CAGGTCCAGCTGGTGCAGTCTGGGCCTGAGGTGAAGA |
| | | | AGCCTGGGTCCTCGGTGAAGGTCTCCTGCAAGGCTTC |
| | | | TGGAGGCACCTTCAGCAGTTATGCTATCACGTGGGTG |
| | | | CGACAGGCCCCTGGACAAGGGCTTGAGTGGATGGGG |
| | | | GGGATCATCCCTTCCTTTGATAGAGTGGACTATTCACG |
| | | | GAACTTCAAGGGGAGAGTCACCTTTACCGCGGACAAA |
| | | | TCCGCGAACACGGCCTACATGGAACTGACCAATGTGA |
| | | | GATCCGACGACACGGCCGTGTATTACTGTGCGAGAGG |
| | | | CTGTTGTGGGGCTGTGGCTGGATTCCAGCACTGGGGC |
| | | | CAGGGCACCGGGGTCACCGTCTCCTCA |
| 262 | 4178 | 482 | QVQLVQSGPEVKKPGSSVKVSCKASGGTFSSYAITWVR |
| | | | QAPGQGLEWMGGIIPSFDRVDYSRNFKGRVTFTADKSA |
| | | | NTAYMELTNVRSDDTAVYYCARGCCGAVAGFQHWGQ |
| | | | GTGVTVSS |
| 262 | 4179 | 483 | GTFSSYAIT |
| 262 | 4180 | 484 | GGCACCTTCAGCAGTTATGCTATCACG |
| 262 | 4181 | 485 | GIIPSFDRVDYSRNFKG |
| 262 | 4182 | 486 | GGGATCATCCCTTCCTTTGATAGAGTGGACTATTCACG |
| | | | GAACTTCAAGGGG |
| 262 | 4183 | 487 | ARGCCGAVAGFQH |
| 262 | 4184 | 488 | GCGAGAGGCTGTTGTGGGGCTGTGGCTGGATTCCAGC |
| | | | AC |
| 262 | 4185 | 489 | GATATTGTGCTGACGCAGACTCCAGCCACCCTGTCTTT |
| | | | ATCTCCAGGGGAAACAGCCACCCTCTCCTGCAGGGCC |
| | | | AGTCAGAGTGTTACCACCTACTTAGCCTGGTACCAGC |
| | | | AGAAACCTGGCCAGGCTCCCAGGCTCCTCATCTATGA |
| | | | TGCATCCAACAGGGCCACTGGCGTCCCAACCAGGTTC |
| | | | AGTGGCAGTGGGTCTGGGACAGACTTCACTCTCACCA |
| | | | TCAGCAGCCTGGAGCCTGAAGATTATGCGATTTATTA |
| | | | CTGTCAGCAACGTACTACCGGGGTCACTTTCGGCGGG |
| | | | GGGACCAAGGTGGAAATCAAA |
| 262 | 4186 | 490 | DIVLTQTPATLSLSPGETATLSCRASQSVTTYLAWYQQK |
| | | | PGQAPRLLIYDASNRATGVPTRFSGSGSGTDFTLTISSLEP |
| | | | EDYAIYYCQQRTTGVTFGGGTKVEIK |
| 262 | 4187 | 491 | RASQSVTTYLA |
| 262 | 4188 | 492 | AGGGCCAGTCAGAGTGTTACCACCTACTTAGCC |
| 262 | 4189 | 493 | DASNRAT |
| 262 | 4190 | 494 | GATGCATCCAACAGGGCCACT |
| 262 | 4191 | 495 | QQRTTGVT |
| 262 | 4192 | 496 | CAGCAACGTACTACCGGGGTCACT |
| 263 | 4193 | 497 | CAGGTGCAGCTGGTGGAGTCTGGGGGAGGCCTGGTCA |
| | | | AGCCTGGGGGGTCCCTGAGACTCTCTTGTGCAGCCTCT |
| | | | GGATTCACCTTCAGTAGTTTTGGCATGCATTGGGTCCG |
| | | | CCAGGCTCCAGGGCAGGGACTGGAGTGGGTCGCATCC |
| | | | ATTACTGGTGGCAGCAGTTACATAAACTACGCAGACT |
| | | | CAGTGAAGGGCCGATTCACCATCTCCAGAGACAACGC |
| | | | CAAGAAGTCACTGTCTCTGCAAATGAAGAACCTGAGA |
| | | | GCCGAGGACACGGCTGAGTATTACTGTGTGCGAGGAG |
| | | | TCCTACCAGGTGGTACTGGGGGGGGCTGGTTCGACTC |
| | | | CTGGGGCCAGGGAACCCTGGTCACCGTCTCCTCA |
| 263 | 4194 | 498 | QVQLVESGGGLVKPGGSLRLSCAASGFTFSSFGMHWVR |
| | | | QAPGQGLEWVASITGGSSYINYADSVKGRFTISRDNAKK |
| | | | SLSLQMKNLRAEDTAEYYCVRGVLPGGTGGGWFDSWG |
| | | | QGTLVTVSS |
| 263 | 4195 | 499 | FTFSSFGMH |
| 263 | 4196 | 500 | TTCACCTTCAGTAGTTTTGGCATGCAT |
| 263 | 4197 | 501 | SITGGSSYINYADSVKG |
| 263 | 4198 | 502 | TCCATTACTGGTGGCAGCAGTTACATAAACTACGCAG |
| | | | ACTCAGTGAAGGGC |
| 263 | 4199 | 503 | VRGVLPGGTGGGWFDS |
| 263 | 4200 | 504 | GTGCGAGGAGTCCTACCAGGTGGTACTGGGGGGGGCT |
| | | | GGTTCGACTCC |
| 263 | 4201 | 505 | CAGTCTGTCCTGACTCAGCCGCCCTCAATGTCTGGGGC |
| | | | CCCAGGGCAGAGGGTCACCATCTCCTGCACTGGGACC |
| | | | AGCTCCAACATCGGGGCGGGTTATGATGTACAGTGGT |
| | | | ATCAGCAGTTTCCAGGAACAGCCCCCAAACTCCTCAT |
| | | | CTCTGGTAACAACAATCGGCCCTCAGGGGTCCCTGAC |
| | | | CGATTCTCTGGCTCCAAGTCTGGCGCCTCAGCCTCCCT |
| | | | GGCCATCACTGGGCTCCAGGCTGAGGATGAGGCTGAT |
| | | | TATTACTGCCAGTCCTATGACTACAGCCTGAATTGGGT |
| | | | GTTCGGCGGAGGGACCAAGCTCACCGTCCTA |
| 263 | 4202 | 506 | QSVLTQPPSMSGAPGQRVTISCTGTSSNIGAGYDVQWYQ |
| | | | QFPGTAPKLLISGNNNRPSGVPDRFSGSKSGASASLAITG |
| | | | LQAEDEADYYCQSYDYSLNWVFGGGTKLTVL |
| 263 | 4203 | 507 | TGTSSNIGAGYDVQ |
| 263 | 4204 | 508 | ACTGGGACCAGCTCCAACATCGGGGCGGGTTATGATG |
| | | | TACAG |
| 263 | 4205 | 509 | GNNNRPS |
| 263 | 4206 | 510 | GGTAACAACAATCGGCCCTCA |
| 263 | 4207 | 511 | QSYDYSLNWV |
| 263 | 4208 | 512 | CAGTCCTATGACTACAGCCTGAATTGGGTG |
| 264 | 4209 | 513 | CAGGTGCAGCTGCAGGAGTCGGGCCCAGGACTGGTGA |
| | | | AGCCTTCACAGACCCTGTCGCTCACCTGCACTGTCTCT |
| | | | GGTCGCTTCCTCAATAGTGGTGATTACTACTGGAGTTG |
| | | | GATCCGCCAGTCCCCAGGGAAGGGCCTGGAGTGGCTT |
| | | | GGTTACATCCATCACAGTGGGAACACCTACTACAACC |
| | | | CGTCCCTCAAGAGTCGACTTACCATATCACTAGACAT |
| | | | GTCCAAGAACCAGTTCTCCCTGAAGTTGAGCTCTGTG |
| | | | ACAGCCGCAGACACGGCCGTCTATTACTGTGCCAGAG |
| | | | ATTTGGGAAAGCCGCTTTGGGACGGCCACTATTACTA |
| | | | CGGAGTGGACGTCTGGGGCCAAGGGACCACGGTCACC |
| | | | GTCTCCTCA |
| 264 | 4210 | 514 | QVQLQESGPGLVKPSQTLSLTCTVSGRFLNSGDYYWSWI |
| | | | RQSPGKGLEWLGYIHHSGNTYYNPSLKSRLTISLDMSKN |
| | | | QFSLKLSSVTAADTAVYYCARDLGKPLWDGHYYYGVD |
| | | | VWGQGTTVTVSS |
| 264 | 4211 | 515 | RFLNSGDYYWS |
| 264 | 4212 | 516 | CGCTTCCTCAATAGTGGTGATTACTACTGGAGT |
| 264 | 4213 | 517 | YIHHSGNTYYNPSLKS |
| 264 | 4214 | 518 | TACATCCATCACAGTGGGAACACCTACTACAACCCGT |
| | | | CCCTCAAGAGT |
| 264 | 4215 | 519 | ARDLGKPLWDGHYYYGVDV |
| 264 | 4216 | 520 | GCCAGAGATTTGGGAAAGCCGCTTTGGGACGGCCACT |
| | | | ATTACTACGGAGTGGACGTC |
| 264 | 4217 | 521 | GATATTGTGATGACTCAGTCTCCAGGCACTCTGTCTTT |
| | | | GTCTCCAGGAGAAAGAGCCACCCTCTCCTGCAGGACC |
| | | | AGTCAGAATGTTAACAGCAACTACTTAGCCTGGTACC |
| | | | AGCATAAACCTGGGCAGGCTCCCAGGCTCCTCATCTA |
| | | | TGGTGCATCCAGCAGGGTCACTGGCATCCCAGACAGG |
| | | | TTCAGTGGCAGTGGGTCTGGGACAGACTTCACTCTCA |
| | | | CCATCACCAGAGTGGAGTCTGAAGATTTTGCAGTGTA |
| | | | TTACTGTCAGGTGTATAGTAGTTCACCTCCGATCACCT |
| | | | TCGGCCAGGGGACCAAGGTGGAGATCAAA |
| 264 | 4218 | 522 | DIVMTQSPGTLSLSPGERATLSCRTSQNVNSNYLAWYQH |
| | | | KPGQAPRLLIYGASSRVTGIPDRFSGSGSGTDFTLTITRVE |
| | | | SEDFAVYYCQVYSSSPPITFGQGTKVEIK |
| 264 | 4219 | 523 | RTSQNVNSNYLA |
| 264 | 4220 | 524 | AGGACCAGTCAGAATGTTAACAGCAACTACTTAGCC |
| 264 | 4221 | 525 | GASSRVT |
| 264 | 4222 | 526 | GGTGCATCCAGCAGGGTCACT |
| 264 | 4223 | 527 | QVYSSSPPIT |
| 264 | 4224 | 528 | CAGGTGTATAGTAGTTCACCTCCGATCACC |
| 265 | 4225 | 529 | CAGGTCCAGCTTGTGCAGTCTGGGGCTGAGGTGAAGA |
| | | | AGCCTGGGTCCTCGGTGAAGGTCTCCTGCAAGGCTTC |
| | | | TGGAGGCACCTTCAGCAGTTATGCTATCAGCTGGGTG |
| | | | CGTCAGGCCCCAGGACAAGGGCTTGAGTGGATGGGA |
| | | | GGAATCATCCCTATGTTTGATATAGTCGACTACGCAC |
| | | | AGAAGTTCCAGGGCAGAGTCACGATTACCGCGGACGA |
| | | | ATCCACGAACACAGCCTACATGGAGCTGACCAGCCTG |
| | | | AGATCTGAGGACACGGCCGTGTATTACTGTGCGAGAA |
| | | | CTGCGGCTTTAGGACCACCTGGGACTATAGTGGGGTA |
| | | | CATGGACGTCTGGGGCAAAGGGACCACGGTCACCGTC |
| | | | TCCTCA |
| 265 | 4226 | 530 | QVQLVQSGAEVKKPGSSVKVSCKASGGTFSSYAISWVR |
| | | | QAPGQGLEWMGGIIPMFDIVDYAQKFQGRVTITADESTN |
| | | | TAYMELTSLRSEDTAVYYCARTAALGPPGTIVGYMDVW |
| | | | GKGTTVTVSS |
| 265 | 4227 | 531 | GTFSSYAIS |
| 265 | 4228 | 532 | GGCACCTTCAGCAGTTATGCTATCAGC |
| 265 | 4229 | 533 | GIIPMFDIVDYAQKFQG |
| 265 | 4230 | 534 | GGAATCATCCCTATGTTTGATATAGTCGACTACGCAC |
| | | | AGAAGTTCCAGGGC |
| 265 | 4231 | 535 | ARTAALGPPGTIVGYMDV |
| 265 | 4232 | 536 | GCGAGAACTGCGGCTTTAGGACCACCTGGGACTATAG |
| | | | TGGGGTACATGGACGTC |
| 265 | 4233 | 537 | GATATTGTGATGACGCAGTCTCCACTCTCCCTGCCCGT |
| | | | CACCCCTGGAGAGCCGGCCTCCATCTCCTGCCGGTCT |
| | | | AGTCAGAGCCTCCTGCAAAGTAATGGATACAACTATT |
| | | | TGGATTGGTACCTGCAGAAGCCAGGGCAGGCTCCACA |
| | | | GCTCCTGATCTATTTGGGTTCTAATCGGGCCTCCGGGG |
| | | | TCCCTGACAAGTTCAGTGGCAGTGGATCAGGCACAGA |
| | | | TTTTACACTGAAAATCAGCAGAGTGGAGGCTGAGGAT |
| | | | GTTGGGGTTTATTACTGCATGCAAACTCTACAAACTCC |
| | | | GTGGACGTTCGGCCAAGGGACCAAGGTGGAAATCAA |
| | | | A |
| 265 | 4234 | 538 | DIVMTQSPLSLPVTPGEPASISCRSSQSLLQSNGYNYLDW |
| | | | YLQKPGQAPQLLIYLGSNRASGVPDKFSGSGSGTDFTLKI |
| | | | SRVEAEDVGVYYCMQTLQTPWTFGQGTKVEIK |
| 265 | 4235 | 539 | RSSQSLLQSNGYNYLD |
| 265 | 4236 | 540 | CGGTCTAGTCAGAGCCTCCTGCAAAGTAATGGATACA |
| | | | ACTATTTGGAT |
| 265 | 4237 | 541 | LGSNRAS |
| 265 | 4238 | 542 | TTGGGTTCTAATCGGGCCTCC |
| 265 | 4239 | 543 | MQTLQTPWT |
| 265 | 4240 | 544 | ATGCAAACTCTACAAACTCCGTGGACG |
| 266 | 4241 | 545 | CAGGTGCAGCTGGTGGAGTCTGGAGCAGAGGCGAGA |
| | | | AAGCCCGGGGAGTCTCTGAAGATCTCCTGTAAGGCTT |
| | | | CTGGATACAGCTTTACCAATTATTGGATCGGCTGGGT |
| | | | GCGCCAGATGCCCGGGAAAGGCCTGGAGTGGATGGG |
| | | | GGTCATCTATCCTGCTGACTCCGATACCAGATATAGCC |
| | | | CGTCCTTCAAAGGCCAGGTCACCATCTCAGCCGACAA |
| | | | ATCCATCAGCACCGCCTACCTCCAGTGGACCAGACTG |
| | | | AAGGCCTCGGACACCGCCGTGTATTTCTGTGCGAGAC |
| | | | TTGGAATAGGAGCTGCTGCCCGGAACTACTGGGGCCA |
| | | | GGGAACCCTGGTCACCGTCTCTTCA |
| 266 | 4242 | 546 | QVQLVESGAEARKPGESLKISCKASGYSFTNYWIGWVR |
| | | | QMPGKGLEWMGVIYPADSDTRYSPSFKGQVTISADKSIS |
| | | | TAYLQWTRLKASDTAVYFCARLGIGAAARNYWGQGTL |
| | | | VTVSS |
| 266 | 4243 | 547 | YSFTNYWIG |
| 266 | 4244 | 548 | TACAGCTTTACCAATTATTGGATCGGC |
| 266 | 4245 | 549 | VIYPADSDTRYSPSFKG |
| 266 | 4246 | 550 | GTCATCTATCCTGCTGACTCCGATACCAGATATAGCCC |
| | | | GTCCTTCAAAGGC |
| 266 | 4247 | 551 | ARLGIGAAARNY |
| 266 | 4248 | 552 | GCGAGACTTGGAATAGGAGCTGCTGCCCGGAACTAC |
| 266 | 4249 | 553 | GACATCCAGGTGACCCAGTCTCCATCCTCCCTGTCTGC |
| | | | ATCTGTAGGAGACAGAGTCACCATCACTTGCCAGGCG |
| | | | AGTCAGGACATTAGCGACAGTTTAAATTGGTATCAGC |
| | | | AGAAACCAGGGAAAGCCCCTAACCTCCTGATCTACGA |
| | | | TGCATCCAAGTCGGAAACAGGGGTCCCATCAAGATTC |
| | | | AGTGGAAGCGGATCTGGGACAGATTTCACTTTCACCA |
| | | | TCAGTAGCCTGCAGCCTGAAGATCTTGCAACATATTA |
| | | | CTGTCTACAGTTTGATAATCTCCCTCCGACCTTCGGCC |
| | | | AAGGGACACGACTGGAGATTAAA |
| 266 | 4250 | 554 | DIQVTQSPSSLSASVGDRVTITCQASQDISDSLNWYQQKP |
| | | | GKAPNLLIYDASKSETGVPSRFSGSGSGTDFTFTISSLQPE |
| | | | DLATYYCLQFDNLPPTFGQGTRLEIK |
| 266 | 4251 | 555 | QASQDISDSLN |
| 266 | 4252 | 556 | CAGGCGAGTCAGGACATTAGCGACAGTTTAAAT |
| 266 | 4253 | 557 | DASKSET |
| 266 | 4254 | 558 | GATGCATCCAAGTCGGAAACA |
| 266 | 4255 | 559 | LQFDNLPPT |
| 266 | 4256 | 560 | CTACAGTTTGATAATCTCCCTCCGACC |
| 267 | 4257 | 561 | GAGGTGCAGCTGGTGGAGTCTGGGGGAGGCCTGGTCA |
| | | | AGCCTGGGGGGGCCCTGAGACTCTCCTGTGCAGCCTC |
| | | | TGGATTCAGCTTCAGGAGCTATAGCATGAACTGGGTC |
| | | | CGCCAGGCTCCAGGGAAGGGGCTGGAGTGGGTCTCAT |
| | | | CCATTAGTAGTAGTAGTAATTACATAAACTACGCAGA |
| | | | CTCAGTGAAGGGCCGATTCAGCATCTCCAGAGACAAC |
| | | | GCCAAGAACTCACTGTATCTGCAAATGAACAGCCTGA |
| | | | GAGCCGAGGACACGGCTGTCTATTACTGTGCGAGAGA |
| | | | TTTGTTACCCGTCGAGCGGGGTCCCGCTTTTGATATCT |
| | | | GGGGCCAAGGGACAATGGTCACCGTCTCTTCA |
| 267 | 4258 | 562 | EVQLVESGGGLVKPGGALRLSCAASGFSFRSYSMNWVR |
| | | | QAPGKGLEWVSSISSSSNYINYADSVKGRFSISRDNAKNS |
| | | | LYLQMNSLRAEDTAVYYCARDLLPVERGPAFDIWGQGT |
| | | | MVTVSS |
| 267 | 4259 | 563 | FSFRSYSMN |
| 267 | 4260 | 564 | TTCAGCTTCAGGAGCTATAGCATGAAC |
| 267 | 4261 | 565 | SISSSSNYINYADSVKG |
| 267 | 4262 | 566 | TCCATTAGTAGTAGTAGTAATTACATAAACTACGCAG |
| | | | ACTCAGTGAAGGGC |
| 267 | 4263 | 567 | ARDLLPVERGPAFDI |
| 267 | 4264 | 568 | GCGAGAGATTTGTTACCCGTCGAGCGGGGTCCCGCTT |
| | | | TTGATATC |
| 267 | 4265 | 569 | TCCTATGAGCTGACACAGCCACCCTCAGTGTCTGGGG |
| | | | CCCCAGGGCAGAGGGTCACCATCTCCTGCACTGGGAG |
| | | | CAGCTCCAACATCGGGGCAGGTTATGATGTACACTGG |
| | | | TTCCAGCAGCTTCCAGGAGCAGCCCCCAAACTCCTCA |
| | | | TCTATGCTAACAGCAATCGGCCCTCAGGGGTCCCTGA |
| | | | CCGATTCTCTGGCTCCAAGTCTGGCACCTCAGCCTCCC |
| | | | TGGCCATCACTGGGCTCCAGGCTGAGGATGAGGCTGA |
| | | | TTATTACTGCCAGTCCTATGACAGCAGACTGGGTGGTT |
| | | | CGGTATTCGGCGGAGGGACCAAGGTGACCGTCCTA |
| 267 | 4266 | 570 | SYELTQPPSVSGAPGQRVTISCTGSSSNIGAGYDVHWFQ |
| | | | QLPGAAPKLLIYANSNRPSGVPDRFSGSKSGTSASLAITG |
| | | | LQAEDEADYYCQSYDSRLGGSVFGGGTKVTVL |
| 267 | 4267 | 571 | TGSSSNIGAGYDVH |
| 267 | 4268 | 572 | ACTGGGAGCAGCTCCAACATCGGGGCAGGTTATGATG |
| | | | TACAC |
| 267 | 4269 | 573 | ANSNRPS |
| 267 | 4270 | 574 | GCTAACAGCAATCGGCCCTCA |
| 267 | 4271 | 575 | QSYDSRLGGSV |
| 267 | 4272 | 576 | CAGTCCTATGACAGCAGACTGGGTGGTTCGGTA |
| 268 | 4273 | 577 | CAGGTCCAGCTTGTGCAGTCTGGACCAGAGGTGAAAA |
| | | | AGCCCGGGGAGTCTCTGACGATCTCCTGTAAGGGTTC |
| | | | TGGATACGACTTTTCCAATAACTGGATCGGCTGGGTG |
| | | | CGCCAGATGCCCGGGAAAGGCCTGGAGTGGATGGGA |
| | | | ATCATCTATCCTGGTGACTCTGATACCAGATACAGCCC |
| | | | GTCGTTCCAAGGCCAGGTCACCCTCTCAGTCGACAAG |
| | | | TCCATTAGTACCGCCTACCTACAGTGGAGGAGCCTGA |
| | | | AGGCCTCGGACAGCGGCATCTACTACTGTGCGAGACA |
| | | | AATTGGCGGTTTGGTTTGTAGCAGTGAGAGCTGCTAC |
| | | | TTCTACGGCATGGACGTCTGGGGCCAAGGGACCACGG |
| | | | TCACCGTCTCCTCA |
| 268 | 4274 | 578 | QVQLVQSGPEVKKPGESLTISCKGSGYDFSNNWIGWVR |
| | | | QMPGKGLEWMGIIYPGDSDTRYSPSFQGQVTLSVDKSIS |
| | | | TAYLQWRSLKASDSGIYYCARQIGGLVCSSESCYFYGM |
| | | | DVWGQGTTVTVSS |
| 268 | 4275 | 579 | YDFSNNWIG |
| 268 | 4276 | 580 | TACGACTTTTCCAATAACTGGATCGGC |
| 268 | 4277 | 581 | IIYPGDSDTRYSPSFQG |
| 268 | 4278 | 582 | ATCATCTATCCTGGTGACTCTGATACCAGATACAGCCC |
| | | | GTCGTTCCAAGGC |
| 268 | 4279 | 583 | ARQIGGLVCSSESCYFYGMDV |
| 268 | 4280 | 584 | GCGAGACAAATTGGCGGTTTGGTTTGTAGCAGTGAGA |
| | | | GCTGCTACTTCTACGGCATGGACGTC |
| 268 | 4281 | 585 | GACATCCAGTTGACCCAGTCTCCATCCTCCCTGTCTGC |
| | | | ATCTGTGGGAGGCAGAGTGACCATCACTTGCCGGGCA |
| | | | AGTCAGAGCATTAGCAACTATTTAAATTGGTATCAAC |
| | | | ACAAACCGGGGAAAGCCCCTGAACTCCTGATCTATGG |
| | | | TGCATCCAGTTTGCAAAGTGGGGTCCCATCAAGGTTC |
| | | | AGTGGCAGTGGATCTGGGACAGACTTCACTCTCACCA |
| | | | TCAGCAGTCTGCAACCTGAAGATTTTGCAACTTACTAC |
| | | | TGTCAACAGAGTGACACTACCCCGTTCACTTTCGGCC |
| | | | AGGGGACCAAAGTGGATATCAAA |
| 268 | 4282 | 586 | DIQLTQSPSSLSASVGGRVTITCRASQSISNYLNWYQHKP |
| | | | GKAPELLIYGASSLQSGVPSRFSGSGSGTDFTLTISSLQPE |
| | | | DFATYYCQQSDTTPFTFGQGTKVDIK |
| 268 | 4283 | 587 | RASQSISNYLN |
| 268 | 4284 | 588 | CGGGCAAGTCAGAGCATTAGCAACTATTTAAAT |
| 268 | 4285 | 589 | GASSLQS |
| 268 | 4286 | 590 | GGTGCATCCAGTTTGCAAAGT |
| 268 | 4287 | 591 | QQSDTTPFT |
| 268 | 4288 | 592 | CAACAGAGTGACACTACCCCGTTCACT |
| 269 | 4289 | 593 | CAGGTCCAGCTGGTGCAGTCTGGGGGAGGCTTGGTAA |
| | | | AGCCGGGGGGGTCCCTTAGACTCTCCTGTGCAGCCTC |
| | | | TGGATTCACTTTCAGTAAGGCCTGGATGAACTGGGTC |
| | | | CGCCAGGCTCCAGGGAAGGGGCTGGAGTGGGTTGGCC |
| | | | GTATTAGAAGCAAAACTGATGGTGGGACAGCAGACTA |
| | | | CGCGGCACCCGTGAAAGGCAGATTCACCATGTCAAGA |
| | | | GATGATTCAAAAAACACGCTGTATTTGCAAATGAACA |
| | | | GCCTGAAAACCGAGGACACAGCCGTGTATTACTGTGC |
| | | | CACAGATTCTCGCCGACTCTATGATAGTCGTGGTTTTT |
| | | | ATTCAAGTGCTTTTGATGTCTGGGGCCAAGGGACCAC |
| | | | GGTCACCGTCTCCTCA |
| 269 | 4290 | 594 | QVQLVQSGGGLVKPGGSLRLSCAASGFTFSKAWMNWV |
| | | | RQAPGKGLEWVGRIRSKTDGGTADYAAPVKGRFTMSR |
| | | | DDSKNTLYLQMNSLKTEDTAVYYCATDSRRLYDSRGFY |
| | | | SSAFDVWGQGTTVTVSS |
| 269 | 4291 | 595 | FTFSKAWMN |
| 269 | 4292 | 596 | TTCACTTTCAGTAAGGCCTGGATGAAC |
| 269 | 4293 | 597 | RIRSKTDGGTADYAAPVKG |
| 269 | 4294 | 598 | CGTATTAGAAGCAAAACTGATGGTGGGACAGCAGACT |
| | | | ACGCGGCACCCGTGAAAGGC |
| 269 | 4295 | 599 | ATDSRRLYDSRGFYSSAFDV |
| 269 | 4296 | 600 | GCCACAGATTCTCGCCGACTCTATGATAGTCGTGGTTT |
| | | | TTATTCAAGTGCTTTTGATGTC |
| 269 | 4297 | 601 | CAGTCTGTCCTGACGCAGCCGCCCTCAGTGTCTGGGG |
| | | | CCCCAGGGCAGAGGGTCACCATCTCCTGCACTGGGAG |
| | | | CAGCTCCAACATCGGGGCGGGTTATGATGTACACTGG |
| | | | TACCAACACCTTCCAGGAACAGCCCCCAAAGTCCTCA |
| | | | TCTATGGTAACAACAATCGGCCCTCAGGGGTCCCTGA |
| | | | CCGATTCTCTGGCTCCAAGTCTGGCACCTCAGCCTCCC |
| | | | TGGCCATCACTGGGCTCCAGGCTGAGGATGAGGCTGA |
| | | | TTATTACTGCCAGTCCTATGACGACAGCCTGACTGGTT |
| | | | GGGTGTTCGGCGGAGGGACCAAGGTCACCGTCCTA |
| 269 | 4298 | 602 | QSVLTQPPSVSGAPGQRVTISCTGSSSNIGAGYDVHWYQ |
| | | | HLPGTAPKVLIYGNNNRPSGVPDRFSGSKSGTSASLAITG |
| | | | LQAEDEADYYCQSYDDSLTGWVFGGGTKVTVL |
| 269 | 4299 | 603 | TGSSSNIGAGYDVH |
| 269 | 4300 | 604 | ACTGGGAGCAGCTCCAACATCGGGGCGGGTTATGATG |
| | | | TACAC |
| 269 | 4301 | 605 | GNNNRPS |
| 269 | 4302 | 606 | GGTAACAACAATCGGCCCTCA |
| 269 | 4303 | 607 | QSYDDSLTGWV |
| 269 | 4304 | 608 | CAGTCCTATGACGACAGCCTGACTGGTTGGGTG |
| 270 | 4305 | 609 | CAGGTGCAGCTGGTGCAATCTGGACCAGAGGTGAAAA |
| | | | AGCCCGGGGAGTCTCTGACGATCTCCTGTAAGGGTTC |
| | | | TGGATACGACTTTTCCAATAACTGGATCGGCTGGGTG |
| | | | CGCCAGATGCCCGGGAAAGGCCTGGAGTGGATGGGA |
| | | | ATCATCTATCCTGGTGACTCTGATACCAGATACAGCCC |
| | | | GTCGTTCCAAGGCCAGGTCACCCTCTCAGTCGACAAG |
| | | | TCCATTAGTACCGCCTACCTACAGTGGAGGAGCCTGA |
| | | | AGGCCTCGGACAGCGGCATCTACTACTGTGCGAGACA |
| | | | AATTGGCGGTTTGGTTTGTAGCAGTGAGAGCTGCTAC |
| | | | TTCTACGGCATGGACGTCTGGGGCCAAGGGACCACGG |
| | | | TCACCGTCTCCTCA |
| 270 | 4306 | 610 | QVQLVQSGPEVKKPGESLTISCKGSGYDFSNNWIGWVR |
| | | | QMPGKGLEWMGIIYPGDSDTRYSPSFQGQVTLSVDKSIS |
| | | | TAYLQWRSLKASDSGIYYCARQIGGLVCSSESCYFYGM |
| | | | DVWGQGTTVTVSS |
| 270 | 4307 | 611 | YDFSNNWIG |
| 270 | 4308 | 612 | TACGACTTTTCCAATAACTGGATCGGC |
| 270 | 4309 | 613 | IIYPGDSDTRYSPSFQG |
| 270 | 4310 | 614 | ATCATCTATCCTGGTGACTCTGATACCAGATACAGCCC |
| | | | GTCGTTCCAAGGC |
| 270 | 4311 | 615 | ARQIGGLVCSSESCYFYGMDV |
| 270 | 4312 | 616 | GCGAGACAAATTGGCGGTTTGGTTTGTAGCAGTGAGA |
| | | | GCTGCTACTTCTACGGCATGGACGTC |
| 270 | 4313 | 617 | GACATCCGGGTGACCCAGTCTCCATCCTCCCTGTCTGC |
| | | | ATCTGTGGGAGGCAGAGTGACCATCACTTGCCGGGCA |
| | | | AGTCAGAGCATTAGCAACTATTTAAATTGGTATCAAC |
| | | | ACAAACCGGGGAAAGCCCCTGAACTCCTGATCTATGG |
| | | | TGCATCCAGTTTGCAAAGTGGGGTCCCATCAAGGTTC |
| | | | AGTGGCAGTGGATCTGGGACAGACTTCACTCTCACCA |
| | | | TCAGCAGTCTGCAACCTGAAGATTTTGCAACTTACTAC |
| | | | TGTCAACAGAGTGACACTACCCCGTTCACTTTCGGCC |
| | | | AGGGGACCAAGCTGGAGATCAAA |
| 270 | 4314 | 618 | DIRVTQSPSSLSASVGGRVTITCRASQSISNYLNWYQHKP |
| | | | GKAPELLIYGASSLQSGVPSRFSGSGSGTDFTLTISSLQPE |
| | | | DFATYYCQQSDTTPFTFGQGTKLEIK |
| 270 | 4315 | 619 | RASQSISNYLN |
| 270 | 4316 | 620 | CGGGCAAGTCAGAGCATTAGCAACTATTTAAAT |
| 270 | 4317 | 621 | GASSLQS |
| 270 | 4318 | 622 | GGTGCATCCAGTTTGCAAAGT |
| 270 | 4319 | 623 | QQSDTTPFT |
| 270 | 4320 | 624 | CAACAGAGTGACACTACCCCGTTCACT |
| 271 | 4321 | 625 | GAGGTGCAGCTGGTGGAGTCTGGGGGAGGCCTGGTCA |
| | | | AGCCTGGGGGGTCCCTGAGACTCTCTTGTGCAGCCTCT |
| | | | GGATTCACCTTCAGTAGTTTTGGCATGCATTGGGTCCG |
| | | | CCAGGCTCCAGGGCAGGGACTGGAGTGGGTCGCATCC |
| | | | ATTACTGGTGGCAGCAGTTACATAAACTACGCAGACT |
| | | | CAGTGAAGGGCCGATTCACCATCTCCAGAGACAACGC |
| | | | CAAGAAGTCACTGTCTCTGCAAATGAAGAACCTGAGA |
| | | | GCCGAGGACACGGCTGAGTATTACTGTGTGCGAGGAG |
| | | | TCCTACCAGGTGATACTGGGGGGGGCTGGTTCGACTC |
| | | | CTGGGGCCAGGGAACCCTGGTCACCGTCTCCTCA |
| 271 | 4322 | 626 | EVQLVESGGGLVKPGGSLRLSCAASGFTFSSFGMHWVR |
| | | | QAPGQGLEWVASITGGSSYINYADSVKGRFTISRDNAKK |
| | | | SLSLQMKNLRAEDTAEYYCVRGVLPGDTGGGWFDSWG |
| | | | QGTLVTVSS |
| 271 | 4323 | 627 | FTFSSFGMH |
| 271 | 4324 | 628 | TTCACCTTCAGTAGTTTTGGCATGCAT |
| 271 | 4325 | 629 | SITGGSSYINYADSVKG |
| 271 | 4326 | 630 | TCCATTACTGGTGGCAGCAGTTACATAAACTACGCAG |
| | | | ACTCAGTGAAGGGC |
| 271 | 4327 | 631 | VRGVLPGDTGGGWFDS |
| 271 | 4328 | 632 | GTGCGAGGAGTCCTACCAGGTGATACTGGGGGGGGCT |
| | | | GGTTCGACTCC |
| 271 | 4329 | 633 | CAGTCTGTGCTGACGCAGCCGCCCTCAATGTCTGGGG |
| | | | CCCCAGGGCAGAGGGTCACCATCTCCTGCACTGGGAC |
| | | | CAGCTCCAACATCGGGGCGGGTTATGATGTACAGTGG |
| | | | TATCAGCAGTTTCCAGGAACAGCCCCCAAACTCCTCA |
| | | | TCTCTGGTAACAACAATCGGCCCTCAGGGGTCCCTGA |
| | | | CCGATTCTCTGGCTCCAAGTCTGGCGCCTCAGCCTCCC |
| | | | TGGCCATCACTGGGCTCCAGGCTGAGGATGAGGCTGA |
| | | | TTATTACTGCCAGTCCTATGACTACAGCCTGAATTGGG |
| | | | TGTTCGGCGGAGGGACCAAGCTGACCGTCCTA |
| 271 | 4330 | 634 | QSVLTQPPSMSGAPGQRVTISCTGTSSNIGAGYDVQWYQ |
| | | | QFPGTAPKLLISGNNNRPSGVPDRFSGSKSGASASLAITG |
| | | | LQAEDEADYYCQSYDYSLNWVFGGGTKLTVL |
| 271 | 4331 | 635 | TGTSSNIGAGYDVQ |
| 271 | 4332 | 636 | ACTGGGACCAGCTCCAACATCGGGGCGGGTTATGATG |
| | | | TACAG |
| 271 | 4333 | 637 | GNNNRPS |
| 271 | 4334 | 638 | GGTAACAACAATCGGCCCTCA |
| 271 | 4335 | 639 | QSYDYSLNWV |
| 271 | 4336 | 640 | CAGTCCTATGACTACAGCCTGAATTGGGTG |
| 272 | 4337 | 641 | CAGGTCCAGCTTGTACAGTCTGGAGCAGAGGTGAAAA |
| | | | AGCCCGGGGAGTCTCTGAAGATCTCCTGTAAGGGTTC |
| | | | TGGATACAGCTTTAGCAGTTTCTGGATCGGCTGGGTG |
| | | | CGCCAGATGCCCGGGAAAGGCCTGGAGTGGATGGGC |
| | | | ATCATATATCCTGGTGACTCTGATACCAGATATAGCCC |
| | | | GTCTTTCCAAGGCCAGGTCACCATGTCAGCCGACACG |
| | | | TCCATAAACACCGCCTACCTGCAGTGGAACAGCGTGA |
| | | | AGGCCTCGGACACCGCCATTTATTACTGTGCGAGACT |
| | | | TCCAGTTGGTAGTTATTATTACTTCAATCTCTGGGGCC |
| | | | GTGGCACCCTGGTCACCGTCTCCTCA |
| 272 | 4338 | 642 | QVQLVQSGAEVKKPGESLKISCKGSGYSFSSFWIGWVRQ |
| | | | MPGKGLEWMGIIYPGDSDTRYSPSFQGQVTMSADTSINT |
| | | | AYLQWNSVKASDTAIYYCARLPVGSYYYFNLWGRGTL |
| | | | VTVSS |
| 272 | 4339 | 643 | YSFSSFWIG |
| 272 | 4340 | 644 | TACAGCTTTAGCAGTTTCTGGATCGGC |
| 272 | 4341 | 645 | IIYPGDSDTRYSPSFQG |
| 272 | 4342 | 646 | ATCATATATCCTGGTGACTCTGATACCAGATATAGCCC |
| | | | GTCTTTCCAAGGC |
| 272 | 4343 | 647 | ARLPVGSYYYFNL |
| 272 | 4344 | 648 | GCGAGACTTCCAGTTGGTAGTTATTATTACTTCAATCT |
| | | | C |
| 272 | 4345 | 649 | GAAATTGTGATGACACAGTCTCCAGCCACCCTGTCTG |
| | | | TGTCTCCAGGGGAAAGCGCCACCCTATTTTGCAGGGC |
| | | | CAGTCAGAGTATTAGTAGCGACTTAGCCTGGTACCAG |
| | | | CAGAGACCTGGCCAGGCTCCCAGGCTCCTCATCTATG |
| | | | ATGCATCCACCAGGGCCACTGGTGTCCCTGCCAGGTT |
| | | | CAGTGCCACTGGGTCTGAGGCAGAGTTCACTCTCACC |
| | | | ATCAGCGGCCTGCAGTCTGAAGATTTTGCAGTTTATTA |
| | | | CTGTCAGCAGTATAATAACTGGCTTTCGTGGACGTTCG |
| | | | GCCAAGGGACCAAGCTGGAGATCAAA |
| 272 | 4346 | 650 | EIVMTQSPATLSVSPGESATLFCRASQSISSDLAWYQQRP |
| | | | GQAPRLLIYDASTRATGVPARFSATGSEAEFTLTISGLQS |
| | | | EDFAVYYCQQYNNWLSWTFGQGTKLEIK |
| 272 | 4347 | 651 | RASQSISSDLA |
| 272 | 4348 | 652 | AGGGCCAGTCAGAGTATTAGTAGCGACTTAGCC |
| 272 | 4349 | 653 | DASTRAT |
| 272 | 4350 | 654 | GATGCATCCACCAGGGCCACT |
| 272 | 4351 | 655 | QQYNNWLSWT |
| 272 | 4352 | 656 | CAGCAGTATAATAACTGGCTTTCGTGGACG |
| 273 | 4353 | 657 | CAGGTGCAGCTGCAGGAGTCGGGCCCAGGACTGGAG |
| | | | AAGCCTTCACAGACCCTGTCCCTCACCTGCACTGTCTC |
| | | | TCGTGGCTCCATCAGAATTGGTGGTTACTTCTGGAGTT |
| | | | GGATCCGCCAGCACCCAGGGAAGGGTCTGGAGTGGCT |
| | | | TGGATACATCTCTAACGATGGGGCCACCGACTACAAC |
| | | | CCGTCCCTCAGGAGTCGACTTGCCATATCAGCAGACA |
| | | | CATCTAAGAACCAGTTTTCCCTGACCCTGAGGTCTGTG |
| | | | ACTGCCGCGGACACGGCCATCTATTACTGTGCGAGAA |
| | | | CTTCTTATGCAGGGCGCATGCTCGACCGCTGGGGCCA |
| | | | GGGAATCCTGGTCACCGTCTCCTCA |
| 273 | 4354 | 658 | QVQLQESGPGLEKPSQTLSLTCTVSRGSIRIGGYFWSWIR |
| | | | QHPGKGLEWLGYISNDGATDYNPSLRSRLAISADTSKNQ |
| | | | FSLTLRSVTAADTAIYYCARTSYAGRMLDRWGQGILVT |
| | | | VSS |
| 273 | 4355 | 659 | GSIRIGGYFWS |
| 273 | 4356 | 660 | GGCTCCATCAGAATTGGTGGTTACTTCTGGAGT |
| 273 | 4357 | 661 | YISNDGATDYNPSLRS |
| 273 | 4358 | 662 | TACATCTCTAACGATGGGGCCACCGACTACAACCCGT |
| | | | CCCTCAGGAGT |
| 273 | 4359 | 663 | ARTSYAGRMLDR |
| 273 | 4360 | 664 | GCGAGAACTTCTTATGCAGGGCGCATGCTCGACCGC |
| 273 | 4361 | 665 | GACATCCGGGTGACCCAGTCTCCAGTCTCCCTGCCCGT |
| | | | CACCCCTGGAGAGCCGGCCTCCATCTCCTGCAGGTCT |
| | | | AGTCAGAGTCTCCTGCATAGTAATGGAAACAACTATT |
| | | | TGGATTGGTACCTGCAGAAGCCAGGGCAGTCTCCACA |
| | | | ACTCCTGATCTATATGGGTTCTTATCGGGCCTCCGGGG |
| | | | TCCCTGACAGGTTCAGCGGCAGTGGATCAGGCACAGA |
| | | | TTTTACACTGAAAATCAGCAGAGTGGAGGCTGAGGAT |
| | | | GTTGGTGTTTATTACTGCATGCAAGGTCTACAAATTCC |
| | | | TTGGACGTTCGGCCAAGGGACCAAGCTGGAGATCAAA |
| 273 | 4362 | 666 | DIRVTQSPVSLPVTPGEPASISCRSSQSLLHSNGNNYLDW |
| | | | YLQKPGQSPQLLIYMGSYRASGVPDRFSGSGSGTDFTLKI |
| | | | SRVEAEDVGVYYCMQGLQIPWTFGQGTKLEIK |
| 273 | 4363 | 667 | RSSQSLLHSNGNNYLD |
| 273 | 4364 | 668 | AGGTCTAGTCAGAGTCTCCTGCATAGTAATGGAAACA |
| | | | ACTATTTGGAT |
| 273 | 4365 | 669 | MGSYRAS |
| 273 | 4366 | 670 | ATGGGTTCTTATCGGGCCTCC |
| 273 | 4367 | 671 | MQGLQIPWT |
| 273 | 4368 | 672 | ATGCAAGGTCTACAAATTCCTTGGACG |
| 274 | 4369 | 673 | GAGGTGCAGCTGTTGGAGTCTGGGGGAGGCGTGGTCC |
| | | | AGCCTGGGAGGTCCCTCAGACTCTCCTGTGCAGCCTCT |
| | | | GGATTCACCTTCAGTAGCTATGCCATGCACTGGGTCC |
| | | | GCCAGACTCCAGACAAGGGGCTGGAGTGGGTGGCACT |
| | | | TATATCCGATGATGGAAGAAATGAATATTATGCAGAT |
| | | | TCCGTGCAGGGCCGATTCACCATCTCCAGAGACAAAT |
| | | | CCAAGAACACGCTGCATCTGGAAATGAACAGCCTGAG |
| | | | AGCTGAGGACACGGCTGTTTATTACTGTGCGAAAGTA |
| | | | CGAAATGAGGCGTGGGAGCTCCTGGGTAATGATGATG |
| | | | CTCTTGATGTCTGGGGCCAAGGGACAATGGTCACCGT |
| | | | CTCTTCA |
| 274 | 4370 | 674 | EVQLLESGGGVVQPGRSLRLSCAASGFTFSSYAMHWVR |
| | | | QTPDKGLEWVALISDDGRNEYYADSVQGRFTISRDKSK |
| | | | NTLHLEMNSLRAEDTAVYYCAKVRNEAWELLGNDDAL |
| | | | DVWGQGTMVTVSS |
| 274 | 4371 | 675 | FTFSSYAMH |
| 274 | 4372 | 676 | TTCACCTTCAGTAGCTATGCCATGCAC |
| 274 | 4373 | 677 | LISDDGRNEYYADSVQG |
| 274 | 4374 | 678 | CTTATATCCGATGATGGAAGAAATGAATATTATGCAG |
| | | | ATTCCGTGCAGGGC |
| 274 | 4375 | 679 | AKVRNEAWELLGNDDALDV |
| 274 | 4376 | 680 | GCGAAAGTACGAAATGAGGCGTGGGAGCTCCTGGGT |
| | | | AATGATGATGCTCTTGATGTC |
| 274 | 4377 | 681 | CAGTCTGTGCTGACGCAGCCGCCCTCAGTGTCTGCGG |
| | | | CCCCAGGACAGAAAGTCACCATCTCCTGCTCTGGAAC |
| | | | TAGCTTCAACATTGGCAGTAATTACGTATCCTGGTACC |
| | | | AGCTACTCCCAGGAACAGCCCCCAAACTCCTCATTTTT |
| | | | GACAATTATAAGCGACCCTCAGGGATTCCTGACCGAT |
| | | | TCTCTGGCTCCTGGTCTGGCACGTCAGCCACCCTGGCC |
| | | | ATCAGCGGACTCCAGACTGGGGACGAGGCCGAATACT |
| | | | TCTGCGGAACTTGGGACACCAGCCTGAGAGCTGGAGT |
| | | | GTTCGGCGGAGGGACCAAGCTCACCGTCCTA |
| 274 | 4378 | 682 | QSVLTQPPSVSAAPGQKVTISCSGTSFNIGSNYVSWYQLL |
| | | | PGTAPKLLIFDNYKRPSGIPDRFSGSWSGTSATLAISGLQT |
| | | | GDEAEYFCGTWDTSLRAGVFGGGTKLTVL |
| 274 | 4379 | 683 | SGTSFNIGSNYVS |
| 274 | 4380 | 684 | TCTGGAACTAGCTTCAACATTGGCAGTAATTACGTATC |
| | | | C |
| 274 | 4381 | 685 | DNYKRPS |
| 274 | 4382 | 686 | GACAATTATAAGCGACCCTCA |
| 274 | 4383 | 687 | GTWDTSLRAGV |
| 274 | 4384 | 688 | GGAACTTGGGACACCAGCCTGAGAGCTGGAGTG |
| 275 | 4385 | 689 | CAGGTCCAGCTGGTGCAGTCTGGGTCTGAGGTGAAGA |
| | | | AGCCTGGGGCCTCAGTGAGGCTCTCCTGCAAGGTTGC |
| | | | CGGTTACAGCCTCAGTGAGTTATCCATGCACTGGGTG |
| | | | CGACAGTCTCCTGGAAAAGGGCTTGAGTGGTTGGGAG |
| | | | CTTTTGACCATGAAGATGCTGAAGCAATCTATGCACC |
| | | | GAGGTTCCAGGGCAGAATCACCATGACCGCGGACACA |
| | | | TCTACGGACACAGCCTACATGGAACTGAGCAGCCTGA |
| | | | GATCTGAGGACACGGCCGTTTATTACTGTGCAACACC |
| | | | GACCCCAGTTGGAGCTACGGACTACTGGGGCCAGGGA |
| | | | ACCCTGGTCACCGTCTCCTCA |
| 275 | 4386 | 690 | QVQLVQSGSEVKKPGASVRLSCKVAGYSLSELSMHWVR |
| | | | QSPGKGLEWLGAFDHEDAEAIYAPRFQGRITMTADTSTD |
| | | | TAYMELSSLRSEDTAVYYCATPTPVGATDYWGQGTLVT |
| | | | VSS |
| 275 | 4387 | 691 | YSLSELSMH |
| 275 | 4388 | 692 | TACAGCCTCAGTGAGTTATCCATGCAC |
| 275 | 4389 | 693 | AFDHEDAEAIYAPRFQG |
| 275 | 4390 | 694 | GCTTTTGACCATGAAGATGCTGAAGCAATCTATGCAC |
| | | | CGAGGTTCCAGGGC |
| 275 | 4391 | 695 | ATPTPVGATDY |
| 275 | 4392 | 696 | GCAACACCGACCCCAGTTGGAGCTACGGACTAC |
| 275 | 4393 | 697 | GACATCCAGATGACCCAGTCTCCATCCTCCCTGTCTGC |
| | | | ATCTGTAGGAGACAGAGTCACCATCACTTGCCGGGCA |
| | | | AGTCAGAGTATTAGTAGTTATTTAAATTGGTATCAAC |
| | | | AAAAACCAGGAAAAGCCCCTAAGCTCCTGATCTATGC |
| | | | TGCATCCAGTTTGCAAAGGGGGGGCCCATCAAGATTC |
| | | | AGTGGCAGTGGATCTGGGACAGATTTCACTCTCACCA |
| | | | TCAGCAGTCTGCAACCTGAAGATTTTGCAACTTACTAT |
| | | | TGTCAACAGAGTTACATTATTCCGTACACTTTTGGCCA |
| | | | GGGGACCAAAGTGGATATCAAA |
| 275 | 4394 | 698 | DIQMTQSPSSLSASVGDRVTITCRASQSISSYLNWYQQKP |
| | | | GKAPKLLIYAASSLQRGGPSRFSGSGSGTDFTLTISSLQPE |
| | | | DFATYYCQQSYIIPYTFGQGTKVDIK |
| 275 | 4395 | 699 | RASQSISSYLN |
| 275 | 4396 | 700 | CGGGCAAGTCAGAGTATTAGTAGTTATTTAAAT |
| 275 | 4397 | 701 | AASSLQR |
| 275 | 4398 | 702 | GCTGCATCCAGTTTGCAAAGG |
| 275 | 4399 | 703 | QQSYIIPYT |
| 275 | 4400 | 704 | CAACAGAGTTACATTATTCCGTACACT |
| 276 | 4401 | 705 | CAGGTGCAGCTGCAGGAGTCCGGCCCAGGACGGGTG |
| | | | AAGCCTTCGGAGACCCTGTCCCTCACCTGCAGTGTCG |
| | | | CTGATGGCTCAATCAGTAGTGGTCATTACTACTGGGG |
| | | | CTGGGTCCGCCAGCCCCCAGGGAAGGGGCTGGAGTGG |
| | | | ATTGCGACAATCCATGATAGTGGGGCCACGTACTACA |
| | | | ACCCGTCCCTCCAGAGTCGAGTCACCATATCCGTAGA |
| | | | CACGTCCAAGAACCAGTTCTCCCTGAAAGTGAATTCT |
| | | | GTGACCGCCGCAGACACGGCTGTCTATTACTGTGCGA |
| | | | GTCGAAGGGGCAGTGGCTGGTTTTTCGACTCCTGGGG |
| | | | CCAGGGAACCCTGGTCACCGTCTCCTCA |
| 276 | 4402 | 706 | QVQLQESGPGRVKPSETLSLTCSVADGSISSGHYYWGW |
| | | | VRQPPGKGLEWIATIHDSGATYYNPSLQSRVTISVDTSK |
| | | | NQFSLKVNSVTAADTAVYYCASRRGSGWFFDSWGQGT |
| | | | LVTVSS |
| 276 | 4403 | 707 | GSISSGHYYWG |
| 276 | 4404 | 708 | GGCTCAATCAGTAGTGGTCATTACTACTGGGGC |
| 276 | 4405 | 709 | TIHDSGATYYNPSLQS |
| 276 | 4406 | 710 | ACAATCCATGATAGTGGGGCCACGTACTACAACCCGT |
| | | | CCCTCCAGAGT |
| 276 | 4407 | 711 | ASRRGSGWFFDS |
| 276 | 4408 | 712 | GCGAGTCGAAGGGGCAGTGGCTGGTTTTTCGACTCC |
| 276 | 4409 | 713 | GATATTGTGCTGACTCAGTCTCCAGCCACCCTGTCTGT |
| | | | GTCTCCAGGGGAAAGAGTCACCCTCTCCTGCAGGGCC |
| | | | AGTCACAGTGTTAACTACAATTTAGCCTGGTACCAGC |
| | | | AGAAACCTGGTCAGGCTCCCAGGCTCCTCATCTATGG |
| | | | TTCATCTACCAGGGCCACTGGTCTCCCAGCCAGGTTCA |
| | | | GTGGCAGTGGGTCTGGGACAGAGTTCACTCTCACCAT |
| | | | CAGCAGCCTGCAGTCTGAAGATTTTGCAATTTATTACT |
| | | | GTCAGCAGTATAATAACTGGCCTCCGGGAGGCACTTT |
| | | | TGGCCAGGGGACCAAGGTGGAAATCAAA |
| 276 | 4410 | 714 | DIVLTQSPATLSVSPGERVTLSCRASHSVNYNLAWYQQK |
| | | | PGQAPRLLIYGSSTRATGLPARFSGSGSGTEFTLTISSLQS |
| | | | EDFAIYYCQQYNNWPPGGTFGQGTKVEIK |
| 276 | 4411 | 715 | RASHSVNYNLA |
| 276 | 4412 | 716 | AGGGCCAGTCACAGTGTTAACTACAATTTAGCC |
| 276 | 4413 | 717 | GSSTRAT |
| 276 | 4414 | 718 | GGTTCATCTACCAGGGCCACT |
| 276 | 4415 | 719 | QQYNNWPPGGT |
| 276 | 4416 | 720 | CAGCAGTATAATAACTGGCCTCCGGGAGGCACT |
| 277 | 4417 | 721 | GAGGTGCAGCTGTTGGAGTCTGGGGGAGGCCTGGTCA |
| | | | AGCCTGGGGGGTCCCTGAGACTCTCCTGTGCAGCCTC |
| | | | TGGATTCACCTTCAGTAGCTATAGCATGAACTGGGTC |
| | | | CGCCAGGCTCCAGGGAAGGGGCTGGAGTGGGTCTCAT |
| | | | CCATTAGTAGTAGTAGTAGTTACATATACTACGCAGA |
| | | | CTCAGTGAAGGGCCGATTCACCATCTCCAGAGACAAC |
| | | | GCCAAGAACTCACTGTATCTGCAAATGAACAGCCTGA |
| | | | GAGCCGAGGACACGGCTGTGTATTACTGTGCGAGAGA |
| | | | TTGGCCGAATAGCAGCTCGTCGCCGAACTGGTTCGAC |
| | | | CCCTGGGGCCAGGGAACCCTGGTCACCGTCTCCTCA |
| 277 | 4418 | 722 | EVQLLESGGGLVKPGGSLRLSCAASGFTFSSYSMNWVR |
| | | | QAPGKGLEWVSSISSSSSYIYYADSVKGRFTISRDNAKNS |
| | | | LYLQMNSLRAEDTAVYYCARDWPNSSSSPNWFDPWGQ |
| | | | GTLVTVSS |
| 277 | 4419 | 723 | FTFSSYSMN |
| 277 | 4420 | 724 | TTCACCTTCAGTAGCTATAGCATGAAC |
| 277 | 4421 | 725 | SISSSSSYIYYADSVKG |
| 277 | 4422 | 726 | TCCATTAGTAGTAGTAGTAGTTACATATACTACGCAG |
| | | | ACTCAGTGAAGGGC |
| 277 | 4423 | 727 | ARDWPNSSSSPNWFDP |
| 277 | 4424 | 728 | GCGAGAGATTGGCCGAATAGCAGCTCGTCGCCGAACT |
| | | | GGTTCGACCCC |
| 277 | 4425 | 729 | CAGTCTGTCCTGACGCAGCCGCCCTCAGTGTCTGGGG |
| | | | CCCCAGGGCAGAGGGTCACCATCTCCTGCACTGGGAG |
| | | | CAGCTCCAACATCGGGGCAGGTTATGATGTACACTGG |
| | | | TACCAGCAGCTTCCAGGAACAGCCCCCAAACTCCTCA |
| | | | TCTATGGTAACAGCAATCGGCCCTCAGGGGTCCCTGA |
| | | | CCGATTCTCTGGCTCCAAGTCTGGCACCTCAGCCTCCC |
| | | | TGGCCATCACTGGGCTCCAGGCTGAGGATGAGGCTGA |
| | | | TTATTACTGCCAGTCCTATGACAGCAGCCTGAGTGGTT |
| | | | TTTATGTCTTCGGAACTGGGACCAAGCTCACCGTCCTA |
| 277 | 4426 | 730 | QSVLTQPPSVSGAPGQRVTISCTGSSSNIGAGYDVHWYQ |
| | | | QLPGTAPKLLIYGNSNRPSGVPDRFSGSKSGTSASLAITG |
| | | | LQAEDEADYYCQSYDSSLSGFYVFGTGTKLTVL |
| 277 | 4427 | 731 | TGSSSNIGAGYDVH |
| 277 | 4428 | 732 | ACTGGGAGCAGCTCCAACATCGGGGCAGGTTATGATG |
| | | | TACAC |
| 277 | 4429 | 733 | GNSNRPS |
| 277 | 4430 | 734 | GGTAACAGCAATCGGCCCTCA |
| 277 | 4431 | 735 | QSYDSSLSGFYV |
| 277 | 4432 | 736 | CAGTCCTATGACAGCAGCCTGAGTGGTTTTTATGTC |
| 278 | 4433 | 737 | CAGGTCCAGCTGGTACAGTCTGGGGCAGAGGTGAAAA |
| | | | AGCCCGGGGAGTCTCTGAAGATCTCCTGTCAGGGTTC |
| | | | TGGATACAGCTTTAGCAGTTTCTGGATCGTCTGGGTGC |
| | | | GCCAGATGCCCGGGAAAGGCCTGGAGTGGATGGGGA |
| | | | GCATCTATCCTGGTGACTCTGACACCAGATACACCCC |
| | | | GTCCTTCCAAGGCCAGGTCACCATCTCAGCCGACAAG |
| | | | TCCACCAGCACCGCCTATTTGCAGTGGAACAGCCTGA |
| | | | AGCCCTCGGACACCGCCATGTATTACTGTGCGAGGTG |
| | | | TAGTCTCAGCTGCGACTACTACGGAGTGAACCTCTGG |
| | | | GGCCAAGGGACCACGGTCACCGTCTCCTCA |
| 278 | 4434 | 738 | QVQLVQSGAEVKKPGESLKISCQGSGYSFSSFWIVWVRQ |
| | | | MPGKGLEWMGSIYPGDSDTRYTPSFQGQVTISADKSTST |
| | | | AYLQWNSLKPSDTAMYYCARCSLSCDYYGVNLWGQGT |
| | | | TVTVSS |
| 278 | 4435 | 739 | YSFSSFWIV |
| 278 | 4436 | 740 | TACAGCTTTAGCAGTTTCTGGATCGTC |
| 278 | 4437 | 741 | SIYPGDSDTRYTPSFQG |
| 278 | 4438 | 742 | AGCATCTATCCTGGTGACTCTGACACCAGATACACCC |
| | | | CGTCCTTCCAAGGC |
| 278 | 4439 | 743 | ARCSLSCDYYGVNL |
| 278 | 4440 | 744 | GCGAGGTGTAGTCTCAGCTGCGACTACTACGGAGTGA |
| | | | ACCTC |
| 278 | 4441 | 745 | CAGTCTGTGGTGACGCAGCCGCCCTCAGTGTCTGGGG |
| | | | CCCCAGGACAGAGGGTCACCATCTCCTGCTCTGGGAG |
| | | | CAGCTCCAACATCGGGGCACGTTCTGATGTACACTGG |
| | | | TACCAGCAGCTTCCAGGAAAAGCCCCCAAACTCCTCA |
| | | | TCTATGGTAACACCAATCGGCCCTTAGGGGTCCCTGA |
| | | | CCGATTCTCTGGCTCCACGTCTGGCACCTCAGCCTCCC |
| | | | TGGCCATCTCTGGGCTCCAGGCTGAGGATGAGGGATA |
| | | | TTATTACTGTCAGTCCTATGACAGCAGCCTGAGTGGTT |
| | | | TTTATGTCTTCGGAACTGGGACCAAGCTCACCGTCCTA |
| 278 | 4442 | 746 | QSVVTQPPSVSGAPGQRVTISCSGSSSNIGARSDVHWYQ |
| | | | QLPGKAPKLLIYGNTNRPLGVPDRFSGSTSGTSASLAISG |
| | | | LQAEDEGYYYCQSYDSSLSGFYVFGTGTKLTVL |
| 278 | 4443 | 747 | SGSSSNIGARSDVH |
| 278 | 4444 | 748 | TCTGGGAGCAGCTCCAACATCGGGGCACGTTCTGATG |
| | | | TACAC |
| 278 | 4445 | 749 | GNTNRPL |
| 278 | 4446 | 750 | GGTAACACCAATCGGCCCTTA |
| 278 | 4447 | 751 | QSYDSSLSGFYV |
| 278 | 4448 | 752 | CAGTCCTATGACAGCAGCCTGAGTGGTTTTTATGTC |
| 279 | 4449 | 753 | CAGGTGCAGCTGGTGGAATCTGGGGGAGGCGTGGTCC |
| | | | AGCCTGGGAGGTCCCTGAGACTCTCCTGTGCAGCCTC |
| | | | TGGATTCCCCTTCAGTCTCTATGCCATGCACTGGGTCC |
| | | | GCCAGGCTCCAGGCAAGGGGCTGGAGTGGGTGGCATT |
| | | | TATATCATATGATGGAAGTAATAAATACTATGCAGAC |
| | | | TCCGTGAAGGGCCGATTCACCATCTCCAGAGACAGTT |
| | | | CCAAGAACACGCTGTATCTGCAAATGGACAGCCTGAC |
| | | | ACCTGAAGACACGGCTGTGTATTACTGTGCGAAACCT |
| | | | ATAGTGGGGCCTACAACGGGTTACTTTGACTACTGGG |
| | | | GCCCGGGAACCCTGGTCACCGTCTCCTCA |
| 279 | 4450 | 754 | QVQLVESGGGVVQPGRSLRLSCAASGFPFSLYAMHWVR |
| | | | QAPGKGLEWVAFISYDGSNKYYADSVKGRFTISRDSSKN |
| | | | TLYLQMDSLTPEDTAVYYCAKPIVGPTTGYFDYWGPGT |
| | | | LVTVSS |
| 279 | 4451 | 755 | FPFSLYAMH |
| 279 | 4452 | 756 | TTCCCCTTCAGTCTCTATGCCATGCAC |
| 279 | 4453 | 757 | FISYDGSNKYYADSVKG |
| 279 | 4454 | 758 | TTTATATCATATGATGGAAGTAATAAATACTATGCAG |
| | | | ACTCCGTGAAGGGC |
| 279 | 4455 | 759 | AKPIVGPTTGYFDY |
| 279 | 4456 | 760 | GCGAAACCTATAGTGGGGCCTACAACGGGTTACTTTG |
| | | | ACTAC |
| 279 | 4457 | 761 | GAAATTGTGTTGACTCAGTCTCCAGCCACCCTGTCTTT |
| | | | GTCTCCAGGGGAAAGAGCCACCCTCTCCTGCAGGGCC |
| | | | AGTCAGAGTGTTAGCAGCTACTTAGCCTGGTACCAAC |
| | | | AGAAACCTGGCCAGGCTCCCAGGCTCCTCATCTATGA |
| | | | TGCATCCAACAGGGCCACTGGCATCCCAGCCAGGTTC |
| | | | AGTGGCAGTGGGTCTGGGACAGACTTCACTCTCACCA |
| | | | TCAGCAGCCTAGAGCCTGAAGATTTTGCAGTTTATTAC |
| | | | TGTCAGCAGCGTAGCAACTGGTACACTTTTGGCCAGG |
| | | | GGACCAAGGTGGAAATCAAA |
| 279 | 4458 | 762 | EIVLTQSPATLSLSPGERATLSCRASQSVSSYLAWYQQKP |
| | | | GQAPRLLIYDASNRATGIPARFSGSGSGTDFTLTISSLEPE |
| | | | DFAVYYCQQRSNWYTFGQGTKVEIK |
| 279 | 4459 | 763 | RASQSVSSYLA |
| 279 | 4460 | 764 | AGGGCCAGTCAGAGTGTTAGCAGCTACTTAGCC |
| 279 | 4461 | 765 | DASNRAT |
| 279 | 4462 | 766 | GATGCATCCAACAGGGCCACT |
| 279 | 4463 | 767 | QQRSNWYT |
| 279 | 4464 | 768 | CAGCAGCGTAGCAACTGGTACACT |
| 280 | 4465 | 769 | GAGGTGCAGCTGGTGGAGTCTGGGGCTGAGGTGAAG |
| | | | AAGCCTGGGGCCTCAGTGAAGGTCTCCTGCCAGACTT |
| | | | CTGGTTACACCTTTAGTCATTTCGGTGTCACCTGGATA |
| | | | CGACAGGCCCCAGGACAAGGGCTTGAGTGGCTGGGAT |
| | | | GGATCAGCGCTTACAATGGTAACACAGACTATGCAGA |
| | | | CAAACTGCAGGGCAGACTCACCATGACCACAGACACA |
| | | | TCCACGAACACCGCCTACATGGAATTGAGGAGCCTCA |
| | | | GATCTGACGACACGGCCGTCTATTACTGTGCGAGAGA |
| | | | TCCCCCCGCATCAGCTGCTGCGATGCTTGACTACTGGG |
| | | | GCCAGGGAACCCTGGTCACCGTCTCCTCA |
| 280 | 4466 | 770 | EVQLVESGAEVKKPGASVKVSCQTSGYTFSHFGVTWIR |
| | | | QAPGQGLEWLGWISAYNGNTDYADKLQGRLTMTTDTS |
| | | | TNTAYMELRSLRSDDTAVYYCARDPPASAAAMLDYWG |
| | | | QGTLVTVSS |
| 280 | 4467 | 771 | YTFSHFGVT |
| 280 | 4468 | 772 | TACACCTTTAGTCATTTCGGTGTCACC |
| 280 | 4469 | 773 | WISAYNGNTDYADKLQG |
| 280 | 4470 | 774 | TGGATCAGCGCTTACAATGGTAACACAGACTATGCAG |
| | | | ACAAACTGCAGGGC |
| 280 | 4471 | 775 | ARDPPASAAAMLDY |
| 280 | 4472 | 776 | GCGAGAGATCCCCCCGCATCAGCTGCTGCGATGCTTG |
| | | | ACTAC |
| 280 | 4473 | 777 | GATATTGTGATGACTCAGTCTCCACTCTCCCTGGCCGT |
| | | | CACCCTTGGACAGCCGGCCTCCATCTCCTGCAAGTCTA |
| | | | GTCAAGGCCTCGAATACACTGATGGAAACACCTACTT |
| | | | GAGTTGGTTTCAGCAGAGGCCAGGCCAATCTCCAAGG |
| | | | CGCCTCATTTATAAGATTTCTAACCGGGACTCTGGGGT |
| | | | TCCAGACAGATTCAGCGGCAGTGGGTCAGGCACTGAT |
| | | | TTCACACTGAGAATCAGCAGGGTGGAGGCTGAGGATG |
| | | | TTGGGGTTTATTACTGCATGCAAGGTACACACGGGCG |
| | | | GGGAATCTCTTTCGGTCCTGGGACCAAAGTGGATATC |
| | | | AAA |
| 280 | 4474 | 778 | DIVMTQSPLSLAVTLGQPASISCKSSQGLEYTDGNTYLS |
| | | | WFQQRPGQSPRRLIYKISNRDSGVPDRFSGSGSGTDFTLR |
| | | | ISRVEAEDVGVYYCMQGTHGRGISFGPGTKVDIK |
| 280 | 4475 | 779 | KSSQGLEYTDGNTYLS |
| 280 | 4476 | 780 | AAGTCTAGTCAAGGCCTCGAATACACTGATGGAAACA |
| | | | CCTACTTGAGT |
| 280 | 4477 | 781 | KISNRDS |
| 280 | 4478 | 782 | AAGATTTCTAACCGGGACTCT |
| 280 | 4479 | 783 | MQGTHGRGIS |
| 280 | 4480 | 784 | ATGCAAGGTACACACGGGCGGGGAATCTCT |
| 281 | 4481 | 785 | CAGGTGCAGCTGGTGCAGTCTGGGGCTGAAGTGAAGA |
| | | | AGCCTGGGGCCTCAGTGAAGGTCTCCTGCAAGGCTTC |
| | | | TGGATACACCTTCACCGACTACTTTATACACTGGGTGC |
| | | | GCCAGGCCCCTGGAGAAGGGCTTGAGTGGATGGGTTG |
| | | | GGTCAACCCTCTCAGTGACAACACAAAATATTCACAG |
| | | | AAGTTTCAGGGCAGGGTCACCATGAGCACGGACACGT |
| | | | CCATCACCACGGCCTACATGTACCTGAGCAGGCTGCG |
| | | | ATTTGACGACACGGCCGTGTATTTTTGTGCGAGCCAAT |
| | | | CTTCCCCCTATACCCCGGGCGCTCTGGACGTCTGGGGC |
| | | | CAAGGGACCACGGTCACCGTCTCCTCA |
| 281 | 4482 | 786 | QVQLVQSGAEVKKPGASVKVSCKASGYTFTDYFIHWVR |
| | | | QAPGEGLEWMGWVNPLSDNTKYSQKFQGRVTMSTDTS |
| | | | ITTAYMYLSRLRFDDTAVYFCASQSSPYTPGALDVWGQ |
| | | | GTTVTVSS |
| 281 | 4483 | 787 | YTFTDYFIH |
| 281 | 4484 | 788 | TACACCTTCACCGACTACTTTATACAC |
| 281 | 4485 | 789 | WVNPLSDNTKYSQKFQG |
| 281 | 4486 | 790 | TGGGTCAACCCTCTCAGTGACAACACAAAATATTCAC |
| | | | AGAAGTTTCAGGGC |
| 281 | 4487 | 791 | ASQSSPYTPGALDV |
| 281 | 4488 | 792 | GCGAGCCAATCTTCCCCCTATACCCCGGGCGCTCTGG |
| | | | ACGTC |
| 281 | 4489 | 793 | GACATCCAGTTGACCCAGTCTCCATCCTCCCTGCCTGC |
| | | | ATCTGTAGGAGACAGAGTCACCATCACTTGCCGGGCA |
| | | | AGTCAGAACATTGGGAACAATTTAGCTTGGTATCAGC |
| | | | AGAAAGCAGGAAGAGCCCCCAAACTCCTGATCTATAG |
| | | | TGCGTCTAATTTCCATAGTGGGGTCCCATCAAGATTCA |
| | | | TTGGCAGTGGATCTGGGACAGTTTTCACTCTCACCATC |
| | | | AGCAGTCTGCAACCTGAAGATTTTGCAACCTACTTCTG |
| | | | TCAACAGAGTTTCACTCCCCAATTCACTTTCGGCCCTG |
| | | | GGACCAAGGTGGAAATCAAA |
| 281 | 4490 | 794 | DIQLTQSPSSLPASVGDRVTITCRASQNIGNNLAWYQQK |
| | | | AGRAPKLLIYSASNFHSGVPSRFIGSGSGTVFTLTISSLQP |
| | | | EDFATYFCQQSFTPQFTFGPGTKVEIK |
| 281 | 4491 | 795 | RASQNIGNNLA |
| 281 | 4492 | 796 | CGGGCAAGTCAGAACATTGGGAACAATTTAGCT |
| 281 | 4493 | 797 | SASNFHS |
| 281 | 4494 | 798 | AGTGCGTCTAATTTCCATAGT |
| 281 | 4495 | 799 | QQSFTPQFT |
| 281 | 4496 | 800 | CAACAGAGTTTCACTCCCCAATTCACT |
| 282 | 4497 | 801 | CAGGTCCAGCTGGTGCAGTCTGGGGCTGAGGTGAAGA |
| | | | GGCCTGGGTCCTCGGTGAGGGTCTCCTGCAAGGCTTC |
| | | | TGGAGGCACCTTCAGGAAGTATGCTATCAGTTGGGTG |
| | | | CGACAGGCCCGTGGACAAGGGCTTGAGTGGATGGGA |
| | | | GGCATCATCCCTATGTCCGGACCACCAAGCTACGCAC |
| | | | AGAAGTTTCAGGGCAGAGTCACGATTACCGCGGACGA |
| | | | ATCCACGAGCACAGTCTACATGGAGCTGAGCAGCCTG |
| | | | AGATTTGAGGACACGGCCGTGTATTTCTGTGCGAGGG |
| | | | ATATCGAGTGGTTCGTACTCATGGACCCTATCACATCC |
| | | | TACTACCCTATGGACGTCTGGGGCCAAGGGACCACGG |
| | | | TCACCGTCTCCTCA |
| 282 | 4498 | 802 | QVQLVQSGAEVKRPGSSVRVSCKASGGTFRKYAISWVR |
| | | | QARGQGLEWMGGIIPMSGPPSYAQKFQGRVTITADESTS |
| | | | TVYMELSSLRFEDTAVYFCARDIEWFVLMDPITSYYPMD |
| | | | VWGQGTTVTVSS |
| 282 | 4499 | 803 | GTFRKYAIS |
| 282 | 4500 | 804 | GGCACCTTCAGGAAGTATGCTATCAGT |
| 282 | 4501 | 805 | GIIPMSGPPSYAQKFQG |
| 282 | 4502 | 806 | GGCATCATCCCTATGTCCGGACCACCAAGCTACGCAC |
| | | | AGAAGTTTCAGGGC |
| 282 | 4503 | 807 | ARDIEWFVLMDPITSYYPMDV |
| 282 | 4504 | 808 | GCGAGGGATATCGAGTGGTTCGTACTCATGGACCCTA |
| | | | TCACATCCTACTACCCTATGGACGTC |
| 282 | 4505 | 809 | CAGTCTGTGGTGACCCAGGAGCCCTCACTGACTGTGT |
| | | | CCCCAGGAGGGACAGTCACTCTCACCTGTGGCTCCAG |
| | | | CACTGGAGGTGTCACCAGTGGTCATCATACATACTGG |
| | | | TTCCAGCAGAAGCCTGGCCAAGCCCCCAGGACACTGA |
| | | | TCTATGATACGACCAACACACACTCCTGGACACCAGC |
| | | | CCGGTTCGCAGGCTCCCTCCTTGGGGGCAAAGCTGCC |
| | | | CTGACCCTTTCGGGTGCGCAGCCTGAGGATGAGGCTG |
| | | | ACTATTACTGCCTCCTCTCCTATAGTGGTGCGCGGCCG |
| | | | GTGTTCGGCGGAGGGACCAAGCTGACCGTCCTA |
| 282 | 4506 | 810 | QSVVTQEPSLTVSPGGTVTLTCGSSTGGVTSGHHTYWFQ |
| | | | QKPGQAPRTLIYDTTNTHSWTPARFAGSLLGGKAALTLS |
| | | | GAQPEDEADYYCLLSYSGARPVFGGGTKLTVL |
| 282 | 4507 | 811 | GSSTGGVTSGHHTY |
| 282 | 4508 | 812 | GGCTCCAGCACTGGAGGTGTCACCAGTGGTCATCATA |
| | | | CATAC |
| 282 | 4509 | 813 | DTTNTHS |
| 282 | 4510 | 814 | GATACGACCAACACACACTCC |
| 282 | 4511 | 815 | LLSYSGARPV |
| 282 | 4512 | 816 | CTCCTCTCCTATAGTGGTGCGCGGCCGGTG |
| 283 | 4513 | 817 | CAGGTGCAGCTGGTGCAGTCTGGGGGAGGCTTGGTCA |
| | | | AGCCTGGAGGGTCCCTGAGACTCTCCTGTGCAGCCTC |
| | | | TGGATTCACCTTCAATGATTACTACATGAATTGGATCC |
| | | | GCCAGGCTCCAGGGAAGGGGCTGGAATGGGTTTCATA |
| | | | CATTAGTAGTAGTGGTGAGACCAAATACTACGCAGAC |
| | | | TCTGTGAAGGGCCGATTCACCATCTCCAGGGACAACG |
| | | | CCAAGAACTCACTGTATCTGGAAATGAACAGCCTGAG |
| | | | AGTCGAGGACACGGCCGTCTACTACTGTGCGAGAGAC |
| | | | GCGGTCATTGTAGTAGGACCGGTTGCTGTTCACTACC |
| | | | AATACTACGCGGACGTCTGGGGCAAAGGGACCACGGT |
| | | | CACCGTCTCTTCA |
| 283 | 4514 | 818 | QVQLVQSGGGLVKPGGSLRLSCAASGFTFNDYYMNWIR |
| | | | QAPGKGLEWVSYISSSGETKYYADSVKGRFTISRDNAKN |
| | | | SLYLEMNSLRVEDTAVYYCARDAVIVVGPVAVHYQYY |
| | | | ADVWGKGTTVTVSS |
| 283 | 4515 | 819 | FTFNDYYMN |
| 283 | 4516 | 820 | TTCACCTTCAATGATTACTACATGAAT |
| 283 | 4517 | 821 | YISSSGETKYYADSVKG |
| 283 | 4518 | 822 | TACATTAGTAGTAGTGGTGAGACCAAATACTACGCAG |
| | | | ACTCTGTGAAGGGC |
| 283 | 4519 | 823 | ARDAVIVVGPVAVHYQYYADV |
| 283 | 4520 | 824 | GCGAGAGACGCGGTCATTGTAGTAGGACCGGTTGCTG |
| | | | TTCACTACCAATACTACGCGGACGTC |
| 283 | 4521 | 825 | CAGCCAGTGCTGACTCAGCCACCCTCAGCGTCTGGGA |
| | | | CCCCCGGGCAGAGGGTCACCATCTCTTGTTCTGGAAG |
| | | | CACCTCCAACATCGGAAGTAACACTGTACACTGGTAC |
| | | | CAGCAACTCCCAGGAACGGCCCCCAGACTCCTCATCT |
| | | | ATGTTATTAATCAGCGGCCCTCAGGGGTCCCAGACCG |
| | | | ATTCTCCGGCTCCAAGTCTGGCACCTCAGCCTCCCTGG |
| | | | CCATCAGTGGGCTCCAGTCTGAGGATGAGGCTGATTA |
| | | | TTACTGTGCAGCATGGGATGACAGCCTGAATGGTCCG |
| | | | GTGTTCGGCGGAGGGACCAAGCTCACCGTCCTA |
| 283 | 4522 | 826 | QPVLTQPPSASGTPGQRVTISCSGSTSNIGSNTVHWYQQL |
| | | | PGTAPRLLIYVINQRPSGVPDRFSGSKSGTSASLAISGLQS |
| | | | EDEADYYCAAWDDSLNGPVFGGGTKLTVL |
| 283 | 4523 | 827 | SGSTSNIGSNTVH |
| 283 | 4524 | 828 | TCTGGAAGCACCTCCAACATCGGAAGTAACACTGTAC |
| | | | AC |
| 283 | 4525 | 829 | VINQRPS |
| 283 | 4526 | 830 | GTTATTAATCAGCGGCCCTCA |
| 283 | 4527 | 831 | AAWDDSLNGPV |
| 283 | 4528 | 832 | GCAGCATGGGATGACAGCCTGAATGGTCCGGTG |
| 284 | 4529 | 833 | CAGGTCCAGCTTGTGCAGTCTGGGGCTGAGGTGAAGA |
| | | | AGCCTGGGTCCTCGGTGAAGGTCTCCTGCAAGGCCTC |
| | | | TGGAGGCACCTTCAGCGGCTACCATATCAGCTGGGTG |
| | | | CGACAGGCCCCTGGACAAGGGCTCGAGTGGATGGGA |
| | | | GGGATCATCCATCTATTTGGGACAGTTAACTACGCTCC |
| | | | GAAGTTCCAGGGCAGAGTCACGATCACCGCGGACGCA |
| | | | TCCACGGGCACAGCCTACATGGAGTTAAACAGCCTGA |
| | | | TGTCTGAAGACACGGCCGTTTATTATTGTGCGAGAGA |
| | | | TGCCTACGAAGTGTGGACTGGTTCTTATCTCCCCCCTT |
| | | | TTGACTACTGGGGCCAGGGAACCCTGGTCACCGTCTC |
| | | | CTCA |
| 284 | 4530 | 834 | QVQLVQSGAEVKKPGSSVKVSCKASGGTFSGYHISWVR |
| | | | QAPGQGLEWMGGIIHLFGTVNYAPKFQGRVTITADAST |
| | | | GTAYMELNSLMSEDTAVYYCARDAYEVWTGSYLPPFD |
| | | | YWGQGTLVTVSS |
| 284 | 4531 | 835 | GTFSGYHIS |
| 284 | 4532 | 836 | GGCACCTTCAGCGGCTACCATATCAGC |
| 284 | 4533 | 837 | GIIHLFGTVNYAPKFQG |
| 284 | 4534 | 838 | GGGATCATCCATCTATTTGGGACAGTTAACTACGCTCC |
| | | | GAAGTTCCAGGGC |
| 284 | 4535 | 839 | ARDAYEVWTGSYLPPFDY |
| 284 | 4536 | 840 | GCGAGAGATGCCTACGAAGTGTGGACTGGTTCTTATC |
| | | | TCCCCCCTTTTGACTAC |
| 284 | 4537 | 841 | GAAATTGTGTTGACACAGTCTCCAGGCACCCTGTCTTT |
| | | | GTCTCCCGGGGAAAGAGTCACCCTCTCCTGCAGGGCC |
| | | | AGTCAGACTGTTACAAGCAGCTACTTAGCCTGGTACC |
| | | | AGCAGAAACCTGGCCAGGCTCCCAGGCTCCTCATCTA |
| | | | TGGTGCATTCACCAGGGCCACTGACATCCCAGACAGG |
| | | | TTCAGTGGCAGTGGGTCTGGGACAGACTTCACTCTCA |
| | | | CCATCAGCAGACTGGAGCCTGAAGATTCTGCAGTATA |
| | | | TTATTGTCAGCAGTATGGTAGCTCATTCCTCACTTTCG |
| | | | GCGGAGGGACCAAAGTGGATATCAAA |
| 284 | 4538 | 842 | EIVLTQSPGTLSLSPGERVTLSCRASQTVTSSYLAWYQQ |
| | | | KPGQAPRLLIYGAFTRATDIPDRFSGSGSGTDFTLTISRLE |
| | | | PEDSAVYYCQQYGSSFLTFGGGTKVDIK |
| 284 | 4539 | 843 | RASQTVTSSYLA |
| 284 | 4540 | 844 | AGGGCCAGTCAGACTGTTACAAGCAGCTACTTAGCC |
| 284 | 4541 | 845 | GAFTRAT |
| 284 | 4542 | 846 | GGTGCATTCACCAGGGCCACT |
| 284 | 4543 | 847 | QQYGSSFLT |
| 284 | 4544 | 848 | CAGCAGTATGGTAGCTCATTCCTCACT |
| 285 | 4545 | 849 | GAGGTGCAGCTGGTGGAGTCTGGGGGAGGCTTGCAAA |
| | | | AGCCCGGGCGGTCCCTGCGACTCTCATGTTCAGCTTCT |
| | | | GGATTCACCTTTGGTGATTATGCTATGAGCTGGTTCCG |
| | | | CCAGGCTCCAGGGAAGGGCCTGGAGTGGGTTGGTTTC |
| | | | ATTAGAAGTAAAGCTTATGTTGGGACCGCAGAATACG |
| | | | CCGCGTCTGTGAAAGGCAGATTCACCATCTCAAGAGA |
| | | | TGATTCCAAAAGCATCGCCTATCTGCACATGAACAGC |
| | | | CTGAAGACCGAGGACACAGCCGTGTATTACTGTACTA |
| | | | GAGATGATATTTTGACTGGTTTTTATGACCGCTCTTAC |
| | | | TATTACGGTATACACGTCTGGGGCCAAGGGACCACGG |
| | | | TCACCGTCTCCTCA |
| 285 | 4546 | 850 | EVQLVESGGGLQKPGRSLRLSCSASGFTFGDYAMSWFR |
| | | | QAPGKGLEWVGFIRSKAYVGTAEYAASVKGRFTISRDD |
| | | | SKSIAYLHMNSLKTEDTAVYYCTRDDILTGFYDRSYYYG |
| | | | IHVWGQGTTVTVSS |
| 285 | 4547 | 851 | FTFGDYAMS |
| 285 | 4548 | 852 | TTCACCTTTGGTGATTATGCTATGAGC |
| 285 | 4549 | 853 | FIRSKAYVGTAEYAASVKG |
| 285 | 4550 | 854 | TTCATTAGAAGTAAAGCTTATGTTGGGACCGCAGAAT |
| | | | ACGCCGCGTCTGTGAAAGGC |
| 285 | 4551 | 855 | TRDDILTGFYDRSYYYGIHV |
| 285 | 4552 | 856 | ACTAGAGATGATATTTTGACTGGTTTTTATGACCGCTC |
| | | | TTACTATTACGGTATACACGTC |
| 285 | 4553 | 857 | GAAATTGTAATGACGCAGTCTCCAGTCACCCTGTCTGT |
| | | | GTCTCCAGGGGAAAGAGCCACCCTCTCCTGCAGGGCC |
| | | | AGTCAGAGTGTTAACAGCAACTTAGCCTGGTACCAGA |
| | | | AGAAACCTGGCCAGGCTCCCAGGCTCCTCATCTATAG |
| | | | TGCATCCACCAGGGCCACTGGTGTCCCAGCCAGGTTC |
| | | | AGTGGCAGTGGGTCTGGGACAGAGTTCACTCTCACCG |
| | | | TCAGCAGCCTTCAGTCTGAAGATTTTGCAGTTTATTAC |
| | | | TGTCAGCAGTATGATAACTGGCCTCCGTACACTTTTGG |
| | | | CCAGGGGACCAAGGTGGAAATCAAA |
| 285 | 4554 | 858 | EIVMTQSPVTLSVSPGERATLSCRASQSVNSNLAWYQKK |
| | | | PGQAPRLLIYSASTRATGVPARFSGSGSGTEFTLTVSSLQ |
| | | | SEDFAVYYCQQYDNWPPYTFGQGTKVEIK |
| 285 | 4555 | 859 | RASQSVNSNLA |
| 285 | 4556 | 860 | AGGGCCAGTCAGAGTGTTAACAGCAACTTAGCC |
| 285 | 4557 | 861 | SASTRAT |
| 285 | 4558 | 862 | AGTGCATCCACCAGGGCCACT |
| 285 | 4559 | 863 | QQYDNWPPYT |
| 285 | 4560 | 864 | CAGCAGTATGATAACTGGCCTCCGTACACT |
| 286 | 4561 | 865 | CAGGTGCAGCTGCAGGAGTCGGGCCCAGGACTGGTGA |
| | | | GGCCTTCACAGACCCTGTCCCTCACCTGCTCCGCCTCT |
| | | | GGTGCAGCCATCAATAGTGGTGATTATTACTGGAGTT |
| | | | GGATCCGCCAGGCCCCTGGGAGGGGCCTAGAGTGGAT |
| | | | TGGGTCCATTTCCAACCGTGGGGTCACCGACTACAAC |
| | | | CCGTCCCTCAAGAGTCGAGTTATCATATCAGCGGACA |
| | | | CGTCCAAGAATCAGTTCTCCCTGAGGCTGACCTCTGTG |
| | | | ACTGCCACAGACACGGCCGTGTATTATTGTGCCAGAG |
| | | | ATTTGGGTACTTTGGCCTTTGATCCCTACTACTATTAC |
| | | | GGTATTGACGTCTGGGGCCAAGGGACCACGGTCACCG |
| | | | TCTCCTCA |
| 286 | 4562 | 866 | QVQLQESGPGLVRPSQTLSLTCSASGAAINSGDYYWSWI |
| | | | RQAPGRGLEWIGSISNRGVTDYNPSLKSRVIISADTSKNQ |
| | | | FSLRLTSVTATDTAVYYCARDLGTLAFDPYYYYGIDVW |
| | | | GQGTTVTVSS |
| 286 | 4563 | 867 | AAINSGDYYWS |
| 286 | 4564 | 868 | GCAGCCATCAATAGTGGTGATTATTACTGGAGT |
| 286 | 4565 | 869 | SISNRGVTDYNPSLKS |
| 286 | 4566 | 870 | TCCATTTCCAACCGTGGGGTCACCGACTACAACCCGT |
| | | | CCCTCAAGAGT |
| 286 | 4567 | 871 | ARDLGTLAFDPYYYYGIDV |
| 286 | 4568 | 872 | GCCAGAGATTTGGGTACTTTGGCCTTTGATCCCTACTA |
| | | | CTATTACGGTATTGACGTC |
| 286 | 4569 | 873 | GACATCCGGATGACCCAGTCTCCAGCCACCCTGTCTTT |
| | | | GTCTCCAGGGGAAAGAGCCACCCTCTCCTGCAGGGCC |
| | | | AGTCAGAGTGTTAGCAGGCATTTAGCCTGGTACCAAC |
| | | | AAAAACCTGGCCAGGCTCCCCGGCTCCTCATCTATGA |
| | | | TGCATCATACAGGGTCACTGGCGTCCCAGACAGGTTC |
| | | | AGTGGCAGTGGGTCTGGGACAGACTTCACTCTCACCA |
| | | | TCAGCAGCCTGGAGTCTGAAGATTTTGCAATTTATTTC |
| | | | TGTCAGCAGCGTAGCACCTGGCCGACGTTCGGCCAAG |
| | | | GGACCAAGGTGGAAATCAAA |
| 286 | 4570 | 874 | DIRMTQSPATLSLSPGERATLSCRASQSVSRHLAWYQQK |
| | | | PGQAPRLLIYDASYRVTGVPDRFSGSGSGTDFTLTISSLES |
| | | | EDFAIYFCQQRSTWPTFGQGTKVEIK |
| 286 | 4571 | 875 | RASQSVSRHLA |
| 286 | 4572 | 876 | AGGGCCAGTCAGAGTGTTAGCAGGCATTTAGCC |
| 286 | 4573 | 877 | DASYRVT |
| 286 | 4574 | 878 | GATGCATCATACAGGGTCACT |
| 286 | 4575 | 879 | QQRSTWPT |
| 286 | 4576 | 880 | CAGCAGCGTAGCACCTGGCCGACG |
| 287 | 4577 | 881 | CAGGTGCAGCTGGTGGAATCTGGGGCTGAGGTGAAGA |
| | | | AGCCTGGGGCCTCAGTGAAGGTTGCCTGCACGGCGTC |
| | | | TGGATACGCCTTCACCAATTACAACATCCACTGGGTG |
| | | | CGACTGGCCCCTGGACAGGGACTTGAGTGGATGGCAA |
| | | | TTATCAACCCCGGTAGTGGTGGCACAGACTACTCAGA |
| | | | GAAGTTCCAGGGCAGGCTCACCTTGACCAGTGACACG |
| | | | TCCACGAGCACGGTGTACATGACGCTGGGCAGCCTGA |
| | | | GATATGAAGACACGGCCTTTTATTACTGTGCGAGAAG |
| | | | GGGTTACCCTGATTCGGGGAGTTACCCCCTTGACTACT |
| | | | GGGGCCAGGGAACCCTGGTCACCGTCTCCTCA |
| 287 | 4578 | 882 | QVQLVESGAEVKKPGASVKVACTASGYAFTNYNIHWV |
| | | | RLAPGQGLEWMAIINPGSGGTDYSEKFQGRLTLTSDTST |
| | | | STVYMTLGSLRYEDTAFYYCARRGYPDSGSYPLDYWGQ |
| | | | GTLVTVSS |
| 287 | 4579 | 883 | YAFTNYNIH |
| 287 | 4580 | 884 | TACGCCTTCACCAATTACAACATCCAC |
| 287 | 4581 | 885 | IINPGSGGTDYSEKFQG |
| 287 | 4582 | 886 | ATTATCAACCCCGGTAGTGGTGGCACAGACTACTCAG |
| | | | AGAAGTTCCAGGGC |
| 287 | 4583 | 887 | ARRGYPDSGSYPLDY |
| 287 | 4584 | 888 | GCGAGAAGGGGTTACCCTGATTCGGGGAGTTACCCCC |
| | | | TTGACTAC |
| 287 | 4585 | 889 | GATATTGTGATGACGCAGTCTCCATCCTCCCTGTCTGC |
| | | | ATCTCTGGGAGACAGAGTCACCATCACTTGCCGGGCA |
| | | | GGTCGGAGCATTGCCACTTACTTAAATTGGTATCAGC |
| | | | AGAAACCAGGGAAAGCCCCTAAGCTCCTGATCTATGG |
| | | | TGCATCCAGTTTGCAAAGTGGCGTCCCATCAAGGTTC |
| | | | AGTGGCAGTGGCTCTGGGACACATTTCACTCTCACCA |
| | | | TCAGCAGTCTGCAACCTGAGGATTTTGCAACTTACTAC |
| | | | TGTCAACAGAGTTACATCCGCCCTATCACTTTCGGCGG |
| | | | AGGGACCAAGGTGGAGATCAAA |
| 287 | 4586 | 890 | DIVMTQSPSSLSASLGDRVTITCRAGRSIATYLNWYQQK |
| | | | PGKAPKLLIYGASSLQSGVPSRFSGSGSGTHFTLTISSLQP |
| | | | EDFATYYCQQSYIRPITFGGGTKVEIK |
| 287 | 4587 | 891 | RAGRSIATYLN |
| 287 | 4588 | 892 | CGGGCAGGTCGGAGCATTGCCACTTACTTAAAT |
| 287 | 4589 | 893 | GASSLQS |
| 287 | 4590 | 894 | GGTGCATCCAGTTTGCAAAGT |
| 287 | 4591 | 895 | QQSYIRPIT |
| 287 | 4592 | 896 | CAACAGAGTTACATCCGCCCTATCACT |
| 288 | 4593 | 897 | CAGGTGCAGCTGCAGGAGTCCGGCCCAGGACTGGTGA |
| | | | AGCCTTCACAGACCCTGTCCCTCACCTGCACTGTCTCT |
| | | | GGTCGTCTCCTCAGCAGTGGTGATTACTACTGGAGTTG |
| | | | GATCCGCCAGTCCCCAGGGAGGGGCCTGGAGTGGATT |
| | | | GGCTACGTCTATCACAGTGGGACCACCTCGTACAACC |
| | | | CGTCCCTCAAGAGTCGAATTACCATGACAGTGGACAC |
| | | | GTCCAAGAACCAGTTCAACCTGAGGTTGACCTCTGTA |
| | | | ACGGCCGCAGACACGGCCGTGTATTACTGTGCCAGAG |
| | | | ATCTCGGATATAGCAGTTCCTCTCCCGCCTTTTATTAC |
| | | | GGTATAGACTTCTGGGGCCCAGGGACCATGGTCACCG |
| | | | TCTCTTCA |
| 288 | 4594 | 898 | QVQLQESGPGLVKPSQTLSLTCTVSGRLLSSGDYYWSWI |
| | | | RQSPGRGLEWIGYVYHSGTTSYNPSLKSRITMTVDTSKN |
| | | | QFNLRLTSVTAADTAVYYCARDLGYSSSSPAFYYGIDFW |
| | | | GPGTMVTVSS |
| 288 | 4595 | 899 | RLLSSGDYYWS |
| 288 | 4596 | 900 | CGTCTCCTCAGCAGTGGTGATTACTACTGGAGT |
| 288 | 4597 | 901 | YVYHSGTTSYNPSLKS |
| 288 | 4598 | 902 | TACGTCTATCACAGTGGGACCACCTCGTACAACCCGT |
| | | | CCCTCAAGAGT |
| 288 | 4599 | 903 | ARDLGYSSSSPAFYYGIDF |
| 288 | 4600 | 904 | GCCAGAGATCTCGGATATAGCAGTTCCTCTCCCGCCTT |
| | | | TTATTACGGTATAGACTTC |
| 288 | 4601 | 905 | GAAATTGTATTGACACAGTCTCCAGCCACCCTGTCTTT |
| | | | GTCTCCAGGGCAAAGAGCGACCCTCTCCTGCAGGGCC |
| | | | AGTCAGAGTGTTGGCAACTACTTAGCCTGGTACCAAC |
| | | | AAAAACCTGGCCAGGCTCCCAGGCTCCTCATCTATGA |
| | | | TGCATCCAACAGGGTCACTGGCATCCCAGCCAGGTTC |
| | | | AGTGGCAGTGGGTCTGGGACAGACTTCACTCTCACCA |
| | | | TCAGCAGGCTAGAGTCTGAAGATTTTGCAGTTTATTAC |
| | | | TGTCAGCAGCGTAGCAACGGGGTCCTCACTTTCGGCG |
| | | | GAGGGACCAAAGTGGATATCAAA |
| 288 | 4602 | 906 | EIVLTQSPATLSLSPGQRATLSCRASQSVGNYLAWYQQK |
| | | | PGQAPRLLIYDASNRVTGIPARFSGSGSGTDFTLTISRLES |
| | | | EDFAVYYCQQRSNGVLTFGGGTKVDIK |
| 288 | 4603 | 907 | RASQSVGNYLA |
| 288 | 4604 | 908 | AGGGCCAGTCAGAGTGTTGGCAACTACTTAGCC |
| 288 | 4605 | 909 | DASNRVT |
| 288 | 4606 | 910 | GATGCATCCAACAGGGTCACT |
| 288 | 4607 | 911 | QQRSNGVLT |
| 288 | 4608 | 912 | CAGCAGCGTAGCAACGGGGTCCTCACT |
| 289 | 4609 | 913 | GAGGTGCAGCTGTTGGAGTCTGGGGCTGAGGTGAAGA |
| | | | AGCCTGGGGCCTCAGTGAGGGTCTCCTGCAAGGCTTC |
| | | | TGGATACACCTTCACCGACTACTTTATGAACTGGGTGC |
| | | | GACAGGCCCCTGGAGGGGGCCTTGAGTGGATGGGGTG |
| | | | GGTCAATCCTCTCAGTGGAGCCACAAAATATGCACAG |
| | | | AAGTTTCAGGGCAGGGTCACCATGACCACGGACACGT |
| | | | CCATCACCACAGGGTACCTGGACTTGAGGAGCCTGAG |
| | | | AGTTGACGACACGGCCATCTATTTTTGTGCGAGCCAG |
| | | | TCTTCCCCTTACACCCCGGGCGCTATGGGCGTCTGGGG |
| | | | CCAAGGGACCACGGTCACCGTCTCTTCA |
| 289 | 4610 | 914 | EVQLLESGAEVKKPGASVRVSCKASGYTFTDYFMNWV |
| | | | RQAPGGGLEWMGWVNPLSGATKYAQKFQGRVTMTTD |
| | | | TSITTGYLDLRSLRVDDTAIYFCASQSSPYTPGAMGVWG |
| | | | QGTTVTVSS |
| 289 | 4611 | 915 | YTFTDYFMN |
| 289 | 4612 | 916 | TACACCTTCACCGACTACTTTATGAAC |
| 289 | 4613 | 917 | WVNPLSGATKYAQKFQG |
| 289 | 4614 | 918 | TGGGTCAATCCTCTCAGTGGAGCCACAAAATATGCAC |
| | | | AGAAGTTTCAGGGC |
| 289 | 4615 | 919 | ASQSSPYTPGAMGV |
| 289 | 4616 | 920 | GCGAGCCAGTCTTCCCCTTACACCCCGGGCGCTATGG |
| | | | GCGTC |
| 289 | 4617 | 921 | GACATCCAGGTGACCCAGTCTCCATCCTCCCTGTCTGC |
| | | | CTCTGTAGGAGACAGAGTCACCATCACTTGCCGGGCA |
| | | | AGTCAGAGCATTAGCGGCTATTTAAGTTGGTATCAGC |
| | | | AGAAACCAGGGAAAGCCCCTAACCTCCTGATCTATGC |
| | | | TACATCCAATTTATACAGTGGGGTCCCATCAAGGTTC |
| | | | AGTGGCCGTGATTCTGGGACAGATTTCACTCTCACCAT |
| | | | CACCAGTCTGCAACCTGAAGATTTTGCAACTTACTTCT |
| | | | GTCAACTGAATTCCGGTGCCCTATTCACTTTCGGCCCT |
| | | | GGGACCAAGGTGGAGATCAAA |
| 289 | 4618 | 922 | DIQVTQSPSSLSASVGDRVTITCRASQSISGYLSWYQQKP |
| | | | GKAPNLLIYATSNLYSGVPSRFSGRDSGTDFTLTITSLQPE |
| | | | DFATYFCQLNSGALFTFGPGTKVEIK |
| 289 | 4619 | 923 | RASQSISGYLS |
| 289 | 4620 | 924 | CGGGCAAGTCAGAGCATTAGCGGCTATTTAAGT |
| 289 | 4621 | 925 | ATSNLYS |
| 289 | 4622 | 926 | GCTACATCCAATTTATACAGT |
| 289 | 4623 | 927 | QLNSGALFT |
| 289 | 4624 | 928 | CAACTGAATTCCGGTGCCCTATTCACT |
| 290 | 4625 | 929 | CAGGTGCAGCTGCAGGAGTCGGGCCCAGGACTGGTGA |
| | | | AGCCTTCACAGACCCTGTCCCTCACCTGCACTGTCTCT |
| | | | GGTCCCTCCATCAGCGCTGGAGATTACAACTGGAATT |
| | | | GGATCCGCCAGGCCCCAGGGAAGGGCCTGGAGTGGG |
| | | | TTGGATACATCGATTACAGGGGCCTCACCCACTACAA |
| | | | CCCGTCCCTCAAGGGTCGACTTTCCATATTAATGGACA |
| | | | GGTCGGCGAACCAGTTCTCCCTGGAGCTGAATTCTGT |
| | | | GACTGCCGCAGACACGGCCGTCTACTACTGTGCCAGG |
| | | | GACGTGGGGGTCTATAGTGGCTACGATGTCTTTCACT |
| | | | ACTACGGCATGGACGTCTGGGGCCAGGGGACCACGGT |
| | | | CACCGTCTCCTCA |
| 290 | 4626 | 930 | QVQLQESGPGLVKPSQTLSLTCTVSGPSISAGDYNWNWI |
| | | | RQAPGKGLEWVGYIDYRGLTHYNPSLKGRLSILMDRSA |
| | | | NQFSLELNSVTAADTAVYYCARDVGVYSGYDVFHYYG |
| | | | MDVWGQGTTVTVSS |
| 290 | 4627 | 931 | PSISAGDYNWN |
| 290 | 4628 | 932 | CCCTCCATCAGCGCTGGAGATTACAACTGGAAT |
| 290 | 4629 | 933 | YIDYRGLTHYNPSLKG |
| 290 | 4630 | 934 | TACATCGATTACAGGGGCCTCACCCACTACAACCCGT |
| | | | CCCTCAAGGGT |
| 290 | 4631 | 935 | ARDVGVYSGYDVFHYYGMDV |
| 290 | 4632 | 936 | GCCAGGGACGTGGGGGTCTATAGTGGCTACGATGTCT |
| | | | TTCACTACTACGGCATGGACGTC |
| 290 | 4633 | 937 | GAAACGACACTCACGCAGTCTCCAGTCACCCTGTCTTT |
| | | | GTCTCCAGGGGAAAGAGCCACCCTCTCCTGCAGGGCC |
| | | | AGTCAGTATGTTAGGAACAACTACTTAGCCTGGTACC |
| | | | AACACAAACCTGGCCAGGCTCCCAGGCTCCTCATCTA |
| | | | TAGTGCTTCCAGCAGGGTCACTGGCACCCCAGACAGG |
| | | | TTCAGTGGCAGTGGGTCTGGGACAGACTTCACTCTCA |
| | | | CCATCAGCAGACTGGAGCCTGAAGACTTTGCAGTGTA |
| | | | TTACTGTCAGCAGTATGGTGGCTCACCTCCGGTCACTT |
| | | | TCGGCCCTGGGACCAAAGTGGATATCAAA |
| 290 | 4634 | 938 | ETTLTQSPVTLSLSPGERATLSCRASQYVRNNYLAWYQH |
| | | | KPGQAPRLLIYSASSRVTGTPDRFSGSGSGTDFTLTISRLE |
| | | | PEDFAVYYCQQYGGSPPVTFGPGTKVDIK |
| 290 | 4635 | 939 | RASQYVRNNYLA |
| 290 | 4636 | 940 | AGGGCCAGTCAGTATGTTAGGAACAACTACTTAGCC |
| 290 | 4637 | 941 | SASSRVT |
| 290 | 4638 | 942 | AGTGCTTCCAGCAGGGTCACT |
| 290 | 4639 | 943 | QQYGGSPPVT |
| 290 | 4640 | 944 | CAGCAGTATGGTGGCTCACCTCCGGTCACT |
| 291 | 4641 | 945 | GAGGTGCAGCTGTTGGAGTCCGGGGGAGGCTTAGTTC |
| | | | AGCCTGGGGGGTCCCTGAGACTATCCTGTGCAGCCTC |
| | | | TGGATTCACCTTCAGTAATTACTGGATGCACTGGGTCC |
| | | | GCCAAGCTCCAGGGAAGGGGCTGGTGTGGGTCTCACG |
| | | | TATTAGCGGTGATGGAAGTGACACAACCTACGCGGAC |
| | | | TCCGTGGAGGGCCGATTCACCATCTCCAGAGACAACG |
| | | | CCAGGAGTACACTGTATCTTCAACTGAATAGTCTCAC |
| | | | AGGCGACGACACGGCTGTGTATTATTGTGCAAGAGAT |
| | | | TTGTGGACCACCTCGCCCTACTTTGACCTCTGGGGCCA |
| | | | GGGAACCCTGGTCACCGTCTCCTCA |
| 291 | 4642 | 946 | EVQLLESGGGLVQPGGSLRLSCAASGFTFSNYWMHWVR |
| | | | QAPGKGLVWVSRISGDGSDTTYADSVEGRFTISRDNARS |
| | | | TLYLQLNSLTGDDTAVYYCARDLWTTSPYFDLWGQGTL |
| | | | VTVSS |
| 291 | 4643 | 947 | FTFSNYWMH |
| 291 | 4644 | 948 | TTCACCTTCAGTAATTACTGGATGCAC |
| 291 | 4645 | 949 | RISGDGSDTTYADSVEG |
| 291 | 4646 | 950 | CGTATTAGCGGTGATGGAAGTGACACAACCTACGCGG |
| | | | ACTCCGTGGAGGGC |
| 291 | 4647 | 951 | ARDLWTTSPYFDL |
| 291 | 4648 | 952 | GCAAGAGATTTGTGGACCACCTCGCCCTACTTTGACCT |
| | | | C |
| 291 | 4649 | 953 | GAAATTGTATTGACACAGTCTCCTGGCACCCTGTCTGC |
| | | | ATCTATTGGAGACAGAGTCACCATCACTTGCCGGGCC |
| | | | AGTCAGAGTCTTAATGGCTGGTTGGCCTGGTATCAGC |
| | | | AGAAACCAGGGAAAGCCCCTAGGCTCCTCATCTATAA |
| | | | GTCGTCTAGTTTAGAAAGCGGGGTCCCATCAAGGTTC |
| | | | AGCGGCAGTGCATCTGGGACAGAATTCACTCTCACCA |
| | | | TCAGCAGCCTGCAGCCTGACGATTTTGCAACTTATTAC |
| | | | TGCCAACAGTATAATAGTTGGGCGTTCGGCCAAGGGA |
| | | | CCAAGGTGGACGTCAAA |
| 291 | 4650 | 954 | EIVLTQSPGTLSASIGDRVTITCRASQSLNGWLAWYQQK |
| | | | PGKAPRLLIYKSSSLESGVPSRFSGSASGTEFTLTISSLQPD |
| | | | DFATYYCQQYNSWAFGQGTKVDVK |
| 291 | 4651 | 955 | RASQSLNGWLA |
| 291 | 4652 | 956 | CGGGCCAGTCAGAGTCTTAATGGCTGGTTGGCC |
| 291 | 4653 | 957 | KSSSLES |
| 291 | 4654 | 958 | AAGTCGTCTAGTTTAGAAAGC |
| 291 | 4655 | 959 | QQYNSWA |
| 291 | 4656 | 960 | CAACAGTATAATAGTTGGGCG |
| 292 | 4657 | 961 | CAGGTGCAGCTACAGCAGTGGGGCGCAGGACTGTTGA |
| | | | AGCCTTCGGAGACCCTGTCCCTCACCTGCGCTGTCTAT |
| | | | GGTGGGTCCTTCAGTGGTTACTCCTGGAGCTGGATCC |
| | | | GCCAGTCCCCAGGGAAGGGGCTGGAGTGGATTGGAG |
| | | | AAATCAATCATAGAGGAAGCACCAACTACAACCCGTC |
| | | | CCTCAAGAGTCGAGTCACCATATCAGTAGACACGTCG |
| | | | AAGAACCAGTTCTCCCTGAAGCTGAGCTCTGTGACCG |
| | | | CCGCGGACACGGCTGTGTACTACTGTGCGGGGACCAA |
| | | | TTATGGAGAGGTTAATACGAGTAACCAATACTTCTTC |
| | | | GGTATGGACGTCTGGGGCCAAGGGACCACGGTCACCG |
| | | | TCTCCTCA |
| 292 | 4658 | 962 | QVQLQQWGAGLLKPSETLSLTCAVYGGSFSGYSWSWIR |
| | | | QSPGKGLEWIGEINHRGSTNYNPSLKSRVTISVDTSKNQF |
| | | | SLKLSSVTAADTAVYYCAGTNYGEVNTSNQYFFGMDV |
| | | | WGQGTTVTVSS |
| 292 | 4659 | 963 | GSFSGYSWS |
| 292 | 4660 | 964 | GGGTCCTTCAGTGGTTACTCCTGGAGC |
| 292 | 4661 | 965 | EINHRGSTNYNPSLKS |
| 292 | 4662 | 966 | GAAATCAATCATAGAGGAAGCACCAACTACAACCCGT |
| | | | CCCTCAAGAGT |
| 292 | 4663 | 967 | AGTNYGEVNTSNQYFFGMDV |
| 292 | 4664 | 968 | GCGGGGACCAATTATGGAGAGGTTAATACGAGTAACC |
| | | | AATACTTCTTCGGTATGGACGTC |
| 292 | 4665 | 969 | GACATCCGGTTGACCCAGTCTCCATCCTCCCTGTCTGC |
| | | | ATCTGTAGGAGACAGAGTCACCATCACTTGCCGGGCA |
| | | | AGTCAGAGCATTACCACCTATTTAAATTGGTATCAGC |
| | | | AGAAACCAGGGAAAGCCCCTAAACTCCTGATCTATGC |
| | | | TGCATCCAATTTGGAAAGTGGGGTCCCATCAAGTTTC |
| | | | AGTGGCAGTGGATTTGGGACAGACTTCACTCTCACCA |
| | | | TCAGCAGTCTGCAACCTGACGATTTTGCAACTTACTAC |
| | | | TGTCAACAGAGTTACAGTGCCCCGCTCACCTTCGGCG |
| | | | GAGGGACCAAAGTGGATATCAAA |
| 292 | 4666 | 970 | DIRLTQSPSSLSASVGDRVTITCRASQSITTYLNWYQQKP |
| | | | GKAPKLLIYAASNLESGVPSSFSGSGFGTDFTLTISSLQPD |
| | | | DFATYYCQQSYSAPLTFGGGTKVDIK |
| 292 | 4667 | 971 | RASQSITTYLN |
| 292 | 4668 | 972 | CGGGCAAGTCAGAGCATTACCACCTATTTAAAT |
| 292 | 4669 | 973 | AASNLES |
| 292 | 4670 | 974 | GCTGCATCCAATTTGGAAAGT |
| 292 | 4671 | 975 | QQSYSAPLT |
| 292 | 4672 | 976 | CAACAGAGTTACAGTGCCCCGCTCACC |
| 293 | 4673 | 977 | CAGGTCCAGCTGGTACAGTCTGGGGCTGGGGTGAAGA |
| | | | AGCCTGGGGCCTCAGTGAGGGTCTCATGCACGGCCTC |
| | | | TGGATACACCTTCACCGACTACTTTATAAACTGGGTGC |
| | | | GACAGGCCCCTGGAGGGGGCCTTGAGTGGATGGGGTG |
| | | | GGTCAATCCTCTCAGTGGAGCCACAAGATACGCCCAG |
| | | | AACTTTGCGGGCAGGGTCACCATGACCACGGACACGT |
| | | | CCATCACCACAGGATATCTGGACTTACGGAACCTGCG |
| | | | ACTTGACGACACGGCCGTCTATTTTTGTGCGAGCCAGT |
| | | | CTTCACCTTACACGCCGGGCGCTATGGACGTCTGGGG |
| | | | CCAAGGGACCACGGTCACCGTCTCCTCA |
| 293 | 4674 | 978 | QVQLVQSGAGVKKPGASVRVSCTASGYTFTDYFINWVR |
| | | | QAPGGGLEWMGWVNPLSGATRYAQNFAGRVTMTTDTS |
| | | | ITTGYLDLRNLRLDDTAVYFCASQSSPYTPGAMDVWGQ |
| | | | GTTVTVSS |
| 293 | 4675 | 979 | YTFTDYFIN |
| 293 | 4676 | 980 | TACACCTTCACCGACTACTTTATAAAC |
| 293 | 4677 | 981 | WVNPLSGATRYAQNFAG |
| 293 | 4678 | 982 | TGGGTCAATCCTCTCAGTGGAGCCACAAGATACGCCC |
| | | | AGAACTTTGCGGGC |
| 293 | 4679 | 983 | ASQSSPYTPGAMDV |
| 293 | 4680 | 984 | GCGAGCCAGTCTTCACCTTACACGCCGGGCGCTATGG |
| | | | ACGTC |
| 293 | 4681 | 985 | GATATTGTGATGACCCAGTCTCCATCCTCCCTGTCTGC |
| | | | ATCTGTAGGAGACAGAGTCTCCATCACTTGCCGGACA |
| | | | AGTCAGACCATTAGTGGCTATATAAGTTGGTATCAGA |
| | | | AGAAACCAGGAAAAGCCCCTAAACTCCTGATCTATGC |
| | | | TGCATCAAATATGTACAGTGGGGTCCCATCAAGGTTC |
| | | | AGTGGCAGTGAATCTGGGACAGATTTCACTCTCACCA |
| | | | TCACCAGTCTGCAACCTGAAGATTTTGCAACTTACTTC |
| | | | TGTCAACTGAATTCCGGTGCCCTATTCACTTTCGGCCC |
| | | | TGGGACCAAAGTGGATATCAAA |
| 293 | 4682 | 986 | DIVMTQSPSSLSASVGDRVSITCRTSQTISGYISWYQKKP |
| | | | GKAPKLLIYAASNMYSGVPSRFSGSESGTDFTLTITSLQP |
| | | | EDFATYFCQLNSGALFTFGPGTKVDIK |
| 293 | 4683 | 987 | RTSQTISGYIS |
| 293 | 4684 | 988 | CGGACAAGTCAGACCATTAGTGGCTATATAAGT |
| 293 | 4685 | 989 | AASNMYS |
| 293 | 4686 | 990 | GCTGCATCAAATATGTACAGT |
| 293 | 4687 | 991 | QLNSGALFT |
| 293 | 4688 | 992 | CAACTGAATTCCGGTGCCCTATTCACT |
| 294 | 4689 | 993 | GAGGTGCAGCTGGTGGAGTCTGCAGCAGAGGTGAAA |
| | | | AAGCCCGGGGAGTCTCTGAAGATCTCCTGTAAGGGTT |
| | | | CTGGATACAGTTTTGCCAGCCACTGGATCGGTTGGGT |
| | | | CCGCCAAATGCCCGGGAAAGGCCTGGAGTTGATGGGA |
| | | | TTCATCTATCCTGGTGACTCTGATACCAGATACAACCC |
| | | | GTCCTTCCAAGGCCAGGTCACCATCTCAGCCGACAAG |
| | | | TCCATCAGCACCGCCTACCTGCAGTGGACCAGGCTGA |
| | | | AGGCCTCGGACACCGCCATGTACTACTGTGGCCAGGC |
| | | | AGTGGCGGGGGGTGAATATTTCCACCACTGGGGCCAG |
| | | | GGCACCCTGGTCACCGTCTCCTCA |
| 294 | 4690 | 994 | EVQLVESAAEVKKPGESLKISCKGSGYSFASHWIGWVR |
| | | | QMPGKGLELMGFIYPGDSDTRYNPSFQGQVTISADKSIST |
| | | | AYLQWTRLKASDTAMYYCGQAVAGGEYFHHWGQGTL |
| | | | VTVSS |
| 294 | 4691 | 995 | YSFASHWIG |
| 294 | 4692 | 996 | TACAGTTTTGCCAGCCACTGGATCGGT |
| 294 | 4693 | 997 | FIYPGDSDTRYNPSFQG |
| 294 | 4694 | 998 | TTCATCTATCCTGGTGACTCTGATACCAGATACAACCC |
| | | | GTCCTTCCAAGGC |
| 294 | 4695 | 999 | GQAVAGGEYFHH |
| 294 | 4696 | 1000 | GGCCAGGCAGTGGCGGGGGGTGAATATTTCCACCAC |
| 294 | 4697 | 1001 | GATATTGTGATGACGCAGTCTCCAGCCACCCTGTCTGT |
| | | | GTCTCCAGGGGAAAGAGCCACCCTCTCCTGCAGGGCC |
| | | | AGTCAGAGTCTTGGCAGCGACTTAGCCTGGTACCAGC |
| | | | AGAAACCTGGCCAGACTCCCAGGCTCCTCATCTATGA |
| | | | TGCATCCACCAGGGCCACTGGTATCCCAGCCAGGTTC |
| | | | AGTGGCAGTGGGTCTGGGACAGAGTTCACTCTCACCA |
| | | | TCAGCAGCCTGCAGTCTGAAGATTTTGCAGTTTATTAC |
| | | | TGTCAGCACTATAATAATTGGCCCCGGGGGTTCGGCC |
| | | | AAGGGACCAAGGTGGAAATCAAA |
| 294 | 4698 | 1002 | DIVMTQSPATLSVSPGERATLSCRASQSLGSDLAWYQQK |
| | | | PGQTPRLLIYDASTRATGIPARFSGSGSGTEFTLTISSLQSE |
| | | | DFAVYYCQHYNNWPRGFGQGTKVEIK |
| 294 | 4699 | 1003 | RASQSLGSDLA |
| 294 | 4700 | 1004 | AGGGCCAGTCAGAGTCTTGGCAGCGACTTAGCC |
| 294 | 4701 | 1005 | DASTRAT |
| 294 | 4702 | 1006 | GATGCATCCACCAGGGCCACT |
| 294 | 4703 | 1007 | QHYNNWPRG |
| 294 | 4704 | 1008 | CAGCACTATAATAATTGGCCCCGGGGG |
| 295 | 4705 | 1009 | CAGGTGCAGCTGCAGGAGTCGGGCCCAGGACGGGTG |
| | | | AAGCCTTCACAGACCCTGTCCCTCACCTGCACTGTCTC |
| | | | TGGTGTCTCCGTCACCATTAATGATTACTACTGGACTT |
| | | | GGCTCCGCCAGTCCCCAGGGAAAGGCCTGGAGTGGAT |
| | | | TGGAAACATCTATAACAGTGGGAGCACCTACCAGAAC |
| | | | CCGTCCCTCCAGAGTCGAGTTACCATGTCAGTGGACA |
| | | | CGGCCAAGAACCACTTCTCCCTGAAGCTGACCTCTGT |
| | | | CACTGCCGCAGATACGGCCGTCTATTACTGTGCCAGA |
| | | | GATTTAGGCACTGCCAACAACTACTACTTCGGTATGG |
| | | | ACGTCTGGGGCCTAGGGACCACGGTCACCGTCTCCTC |
| | | | A |
| 295 | 4706 | 1010 | QVQLQESGPGRVKPSQTLSLTCTVSGVSVTINDYYWTW |
| | | | LRQSPGKGLEWIGNIYNSGSTYQNPSLQSRVTMSVDTAK |
| | | | NHFSLKLTSVTAADTAVYYCARDLGTANNYYFGMDVW |
| | | | GLGTTVTVSS |
| 295 | 4707 | 1011 | VSVTINDYYWT |
| 295 | 4708 | 1012 | GTCTCCGTCACCATTAATGATTACTACTGGACT |
| 295 | 4709 | 1013 | NIYNSGSTYQNPSLQS |
| 295 | 4710 | 1014 | AACATCTATAACAGTGGGAGCACCTACCAGAACCCGT |
| | | | CCCTCCAGAGT |
| 295 | 4711 | 1015 | ARDLGTANNYYFGMDV |
| 295 | 4712 | 1016 | GCCAGAGATTTAGGCACTGCCAACAACTACTACTTCG |
| | | | GTATGGACGTC |
| 295 | 4713 | 1017 | GAAATTGTGATGACGCAGTCTCCAGCCACCCTGTCTTT |
| | | | GTCTCCAGGGGAAAGAGCCACTCTCTCCTGCAGGGCC |
| | | | AGTCAGAGTGTTAGCACCTACTTAGCCTGGTACCAAC |
| | | | AGAAACCTGGCCAGGCTCCCAGGCTCCTCATCTATAA |
| | | | TGGATCCAACAGGGTCACTGGCACCCCAGCCAGGTTC |
| | | | AGTGGCAGTGGGTCTGGGACAGACTTCACTCTCACCA |
| | | | TCAGCAGCGTAGAGCCTGAAGATTTTGCAGTTTATTA |
| | | | CTGTCAGCAGCGTAGCAACTGGCCTCCGTACACTTTTG |
| | | | GCCAGGGGACCAAGGTGGAGATCAAA |
| 295 | 4714 | 1018 | EIVMTQSPATLSLSPGERATLSCRASQSVSTYLAWYQQK |
| | | | PGQAPRLLIYNGSNRVTGTPARFSGSGSGTDFTLTISSVEP |
| | | | EDFAVYYCQQRSNWPPYTFGQGTKVEIK |
| 295 | 4715 | 1019 | RASQSVSTYLA |
| 295 | 4716 | 1020 | AGGGCCAGTCAGAGTGTTAGCACCTACTTAGCC |
| 295 | 4717 | 1021 | NGSNRVT |
| 295 | 4718 | 1022 | AATGGATCCAACAGGGTCACT |
| 295 | 4719 | 1023 | QQRSNWPPYT |
| 295 | 4720 | 1024 | CAGCAGCGTAGCAACTGGCCTCCGTACACT |
| 296 | 4721 | 1025 | CAGGTGCAGCTGCAGGAGTCGGGCCCAGGACTGGTGA |
| | | | AGCCTTCGGAGACCCTGTCCCTCACCTGCTCGGTCTCT |
| | | | GGTGCCTCCGTCACCAGTAGGGAATACTACTGGGGCT |
| | | | GGATCCGCCAGGCCCCCGGGAAGGGTCTGCAGTGGAT |
| | | | TGCCAGCATTCATCACAGTCCTTTTCAAAGTGACGGC |
| | | | AACCCGTCCCTGACGAGTCGCGTCTCCAGTTCCGTAGT |
| | | | CACGTCCAAGAACCAGTTGGCCCTGAGGCTGAGCTCT |
| | | | GTGACCGCCGCAGACACGGCTGTATATTACTGTGCGG |
| | | | GCGCGTTTTGGGAGGTTTGGACTGGCCTTTATTCACCG |
| | | | CCGTTTGACTTTTGGGGCCAGGGAATCCTGGTCACCGT |
| | | | CTCCTCA |
| 296 | 4722 | 1026 | QVQLQESGPGLVKPSETLSLTCSVSGASVTSREYYWGWI |
| | | | RQAPGKGLQWIASIHHSPFQSDGNPSLTSRVSSSVVTSKN |
| | | | QLALRLSSVTAADTAVYYCAGAFWEVWTGLYSPPFDF |
| | | | WGQGILVTVSS |
| 296 | 4723 | 1027 | ASVTSREYYWG |
| 296 | 4724 | 1028 | GCCTCCGTCACCAGTAGGGAATACTACTGGGGC |
| 296 | 4725 | 1029 | SIHHSPFQSDGNPSLTS |
| 296 | 4726 | 1030 | AGCATTCATCACAGTCCTTTTCAAAGTGACGGCAACC |
| | | | CGTCCCTGACGAGT |
| 296 | 4727 | 1031 | AGAFWEVWTGLYSPPFDF |
| 296 | 4728 | 1032 | GCGGGCGCGTTTTGGGAGGTTTGGACTGGCCTTTATTC |
| | | | ACCGCCGTTTGACTTT |
| 296 | 4729 | 1033 | GAAATTGTAATGACACAGTCTCCAGGGACCCTGTCTT |
| | | | TGTCTCCAGGGGAAAGAGCCACCCTCTCCTGCTGGGC |
| | | | CAGTCAGACTGTTAGCAGCGGCTACTTAGCCTGGTAC |
| | | | CAGCAGAAACCTGGCCAGGCTCCCAGGCTCCTCATCT |
| | | | ATGGTGCATCTACCAGGGCCACTGACATCCCAGACAG |
| | | | GTTCAGTGGCAGTGGGTCTGGGACAGGCTTCACTCTC |
| | | | ACCATCAGCAGACTGGAGCCTGAAGATCTTGCAGTCT |
| | | | ATTACTGTCAGCAGTATAGCAGTTCACCACTCACTTTC |
| | | | GGCGGCGGGACCAAGGTGGAAATCAAA |
| 296 | 4730 | 1034 | EIVMTQSPGTLSLSPGERATLSCWASQTVSSGYLAWYQQ |
| | | | KPGQAPRLLIYGASTRATDIPDRFSGSGSGTGFTLTISRLE |
| | | | PEDLAVYYCQQYSSSPLTFGGGTKVEIK |
| 296 | 4731 | 1035 | WASQTVSSGYLA |
| 296 | 4732 | 1036 | TGGGCCAGTCAGACTGTTAGCAGCGGCTACTTAGCC |
| 296 | 4733 | 1037 | GASTRAT |
| 296 | 4734 | 1038 | GGTGCATCTACCAGGGCCACT |
| 296 | 4735 | 1039 | QQYSSSPLT |
| 296 | 4736 | 1040 | CAGCAGTATAGCAGTTCACCACTCACT |
| 297 | 4737 | 1041 | CAGGTGCAGCTGGTGCAGTCTGGAGCTGAGGTGAAGA |
| | | | AGCCTGGGGCCTCAGTGAAGGTCTCGTGCAAGACTTC |
| | | | TGGTTACACCTTTTCCAACTACGGTATCAGCTGGCTGC |
| | | | GACAGGCCCCTGGACAAGGGCTTGAGTGGATGGCATG |
| | | | GATCAGCCCTTATAATGGGAACACAAAGTCTGCACAG |
| | | | AGGTTTCAGGGCAGAGTCATCATGACCACAGACACAT |
| | | | CCACGAGGACAGCCCACATGGAGGTGAAGAGCCTGA |
| | | | GAACTGACGACACGGCCACATATTACTGTGCGAGAGA |
| | | | TCCAGCAGTCGATGCAATACCGATGCTTGACTACTGG |
| | | | GGCCAGGGAACCACGGTCACCGTCTCCTCA |
| 297 | 4738 | 1042 | QVQLVQSGAEVKKPGASVKVSCKTSGYTFSNYGISWLR |
| | | | QAPGQGLEWMAWISPYNGNTKSAQRFQGRVIMTTDTST |
| | | | RTAHMEVKSLRTDDTATYYCARDPAVDAIPMLDYWGQ |
| | | | GTTVTVSS |
| 297 | 4739 | 1043 | YTFSNYGIS |
| 297 | 4740 | 1044 | TACACCTTTTCCAACTACGGTATCAGC |
| 297 | 4741 | 1045 | WISPYNGNTKSAQRFQG |
| 297 | 4742 | 1046 | TGGATCAGCCCTTATAATGGGAACACAAAGTCTGCAC |
| | | | AGAGGTTTCAGGGC |
| 297 | 4743 | 1047 | ARDPAVDAIPMLDY |
| 297 | 4744 | 1048 | GCGAGAGATCCAGCAGTCGATGCAATACCGATGCTTG |
| | | | ACTAC |
| 297 | 4745 | 1049 | GACATCCAGGTGACCCAGTCTCCACTCTCCCTGCCCGT |
| | | | CACCCTTGGACAGCCGGCCTCCATCTCCTGCAGGTCTA |
| | | | GTCAAAGCCTCGTGTACACTGATGGAAACACCTACTT |
| | | | GAGCTGGTTTCAGCAGAGGCCAGGCCAATCTCCAAGG |
| | | | CGCCTAATTTATAGGGTTTCTCACCGGGACTCTGGGGT |
| | | | CCCAGACAGATTCACCGGCAGTGGGTCAGGCACTGAT |
| | | | TTCACACTGATAATCCGCAGGGTGGAGGCTGAGGATG |
| | | | TTGGGGTTTATTACTGCATGCAAGGTACACACTGGCCT |
| | | | CTCACTTTCGGCGGAGGGACCAAGGTGGAAATCAAA |
| 297 | 4746 | 1050 | DIQVTQSPLSLPVTLGQPASISCRSSQSLVYTDGNTYLSW |
| | | | FQQRPGQSPRRLIYRVSHRDSGVPDRFTGSGSGTDFTLIIR |
| | | | RVEAEDVGVYYCMQGTHWPLTFGGGTKVEIK |
| 297 | 4747 | 1051 | RSSQSLVYTDGNTYLS |
| 297 | 4748 | 1052 | AGGTCTAGTCAAAGCCTCGTGTACACTGATGGAAACA |
| | | | CCTACTTGAGC |
| 297 | 4749 | 1053 | RVSHRDS |
| 297 | 4750 | 1054 | AGGGTTTCTCACCGGGACTCT |
| 297 | 4751 | 1055 | MQGTHWPLT |
| 297 | 4752 | 1056 | ATGCAAGGTACACACTGGCCTCTCACT |
| 298 | 4753 | 1057 | CAGGTCCAGCTGGTGCAGTCTGGGGGAGGCGTGGTCC |
| | | | AGCCTGGGAGGTCCCTGAGACTCTCCTGTGCAGCCTC |
| | | | TGGATTCACGTTCAGTGACTATGCCATGCACTGGGTCC |
| | | | GCCAGGCTCCAGGCAAGGGGCTGGAGTGGGTGGCAA |
| | | | TCATATCATATGATGCAAATAATAAATATTATGCAGA |
| | | | CTCCGTGAAGGGCCGATTCACCATCTCCAGAGACAAT |
| | | | TCCAAGAACACGGTGTATCTGCAAATGAACAGCCTGA |
| | | | GACCTGAGGACACGGCTGTATATTACTGTGCGAAAGA |
| | | | AGAGTGGCTGGTGCCAGCCTACTGGGGCCAGGGAATC |
| | | | CTGGTCACCGTCTCCTCA |
| 298 | 4754 | 1058 | QVQLVQSGGGVVQPGRSLRLSCAASGFTFSDYAMHWV |
| | | | RQAPGKGLEWVAIISYDANNKYYADSVKGRFTISRDNS |
| | | | KNTVYLQMNSLRPEDTAVYYCAKEEWLVPAYWGQGIL |
| | | | VTVSS |
| 298 | 4755 | 1059 | FTFSDYAMH |
| 298 | 4756 | 1060 | TTCACGTTCAGTGACTATGCCATGCAC |
| 298 | 4757 | 1061 | IISYDANNKYYADSVKG |
| 298 | 4758 | 1062 | ATCATATCATATGATGCAAATAATAAATATTATGCAG |
| | | | ACTCCGTGAAGGGC |
| 298 | 4759 | 1063 | AKEEWLVPAY |
| 298 | 4760 | 1064 | GCGAAAGAAGAGTGGCTGGTGCCAGCCTAC |
| 298 | 4761 | 1065 | CAGTCTGTGCTGACTCAGCCTGCCTCCGTGTCTGGGTC |
| | | | TCCTGGACAGTCGATCACCATCTCCTGCACTGGAACC |
| | | | AGCAGTGACGTTGGTGGATATAATTACGTCTCCTGGT |
| | | | ACCAACAACACCCAGGCAAAGCCCCCAAACTCTTAAT |
| | | | TTATGAGGTCTCTAATCGGCCCTCAGGGGTTTCTAATC |
| | | | GCTTCTCTGGCTCCAAGTCTGGCAACACGGCCTCCCTG |
| | | | ACCATCTCTGGGCTCCAGCCTGAGGACGAGGCTGATT |
| | | | ATTACTGCAGCTCATATTCAACCAATAGTGCCCCCTTT |
| | | | GGAACTGGGACCAAGCTCACCGTCCTA |
| 298 | 4762 | 1066 | QSVLTQPASVSGSPGQSITISCTGTSSDVGGYNYVSWYQ |
| | | | QHPGKAPKLLIYEVSNRPSGVSNRFSGSKSGNTASLTISG |
| | | | LQPEDEADYYCSSYSTNSAPFGTGTKLTVL |
| 298 | 4763 | 1067 | TGTSSDVGGYNYVS |
| 298 | 4764 | 1068 | ACTGGAACCAGCAGTGACGTTGGTGGATATAATTACG |
| | | | TCTCC |
| 298 | 4765 | 1069 | EVSNRPS |
| 298 | 4766 | 1070 | GAGGTCTCTAATCGGCCCTCA |
| 298 | 4767 | 1071 | SSYSTNSAP |
| 298 | 4768 | 1072 | AGCTCATATTCAACCAATAGTGCCCCC |
| 299 | 4769 | 1073 | CAGGTCCAGCTTGTGCAGTCTGGGGGAGGCGTGGTCC |
| | | | AGTCTGGGAGGTCCCTGAGACTCTCCTGTGCAGCGTC |
| | | | TGGATTCACCTTCAGTGACAATGGCATGCACTGGGTC |
| | | | CGCCAGGCTCCAGGCAAGGGGCTGGAGTGGGTGGCA |
| | | | GGAATCTTTCATGATGGGAGTAATAAACAATATGCAG |
| | | | AATCCGTGAAGGGCCGATTCATCATCTCCAGAGACAA |
| | | | TTCCAAGAACACTCTCTATCTGCAAATGAACAGCCTG |
| | | | AGAGCCGAGGACACGGCTCTATATTTCTGTGCGAGAG |
| | | | CCCCTTACGATATTTGGAGCGGATATTGTCTTGACTAC |
| | | | TGGGGCCAGGGAACCCTGGTCACCGTCTCCTCA |
| 299 | 4770 | 1074 | QVQLVQSGGGVVQSGRSLRLSCAASGFTFSDNGMHWV |
| | | | RQAPGKGLEWVAGIFHDGSNKQYAESVKGRFIISRDNSK |
| | | | NTLYLQMNSLRAEDTALYFCARAPYDIWSGYCLDYWG |
| | | | QGTLVTVSS |
| 299 | 4771 | 1075 | FTFSDNGMH |
| 299 | 4772 | 1076 | TTCACCTTCAGTGACAATGGCATGCAC |
| 299 | 4773 | 1077 | GIFHDGSNKQYAESVKG |
| 299 | 4774 | 1078 | GGAATCTTTCATGATGGGAGTAATAAACAATATGCAG |
| | | | AATCCGTGAAGGGC |
| 299 | 4775 | 1079 | ARAPYDIWSGYCLDY |
| 299 | 4776 | 1080 | GCGAGAGCCCCTTACGATATTTGGAGCGGATATTGTC |
| | | | TTGACTAC |
| 299 | 4777 | 1081 | GACATCCGGATGACCCAGTCTCCAGCCACCCTGTCTCT |
| | | | GTCTCCAGGGGAAAGCGCCACCCTCTCCTGCAGGGCC |
| | | | AGTCAGAGTGTTATCAACAACTTAGCCTGGTACCAGC |
| | | | AGAGACCTGGCCAGGCTCCCAGGCTCCTCATCTATGG |
| | | | TGCATCTACCAGGGCCACTGGTATCCCAGCCAGGTTC |
| | | | AGTGGCAGTGGGTCTGAGACAGAGTTCACTCTCACTA |
| | | | TCAGCAGCCTGCAGTCTGAAGATTTCGCGGTTTATCAC |
| | | | TGTCAGCAGTATAGTATCTGGCCTCAGACTTTTGGCCA |
| | | | GGGGACCAAGCTGGAGATCAAA |
| 299 | 4778 | 1082 | DIRMTQSPATLSLSPGESATLSCRASQSVINNLAWYQQR |
| | | | PGQAPRLLIYGASTRATGIPARFSGSGSETEFTLTISSLQSE |
| | | | DFAVYHCQQYSIWPQTFGQGTKLEIK |
| 299 | 4779 | 1083 | RASQSVINNLA |
| 299 | 4780 | 1084 | AGGGCCAGTCAGAGTGTTATCAACAACTTAGCC |
| 299 | 4781 | 1085 | GASTRAT |
| 299 | 4782 | 1086 | GGTGCATCTACCAGGGCCACT |
| 299 | 4783 | 1087 | QQYSIWPQT |
| 299 | 4784 | 1088 | CAGCAGTATAGTATCTGGCCTCAGACT |
| 300 | 4785 | 1089 | GAGGTGCAGCTGTTGGAGTCCGGGGGAGGCGTGGTCC |
| | | | AGTCTGGGAGGTCCCTGAGACTCTCCTGTGTAGCGTCT |
| | | | GGATTCACCTTCAGTGACAGTGGCATGCACTGGGTCC |
| | | | GCCAGGCTCCAGGCAAGGGGCTGGAGTGGGTGGCAG |
| | | | GTTTATTTTATGATGGAAGTAATAAACAATATGCAGA |
| | | | CTCCGTGAAGGGCCGATTCACCATCTCCAGAGACAAT |
| | | | TCCAAGAGCACACTGTATCTGCAGATGAACAGCCTGA |
| | | | GGGCCGAGGACACGGCTGTTTATTACTGTGCGAGAGC |
| | | | CCCTTACGATATTTGGAGTGGTTATTGTCTTGACTACT |
| | | | GGGGCCAGGGAACCCTGGTCACTGTCTCCTCA |
| 300 | 4786 | 1090 | EVQLLESGGGVVQSGRSLRLSCVASGFTFSDSGMHWVR |
| | | | QAPGKGLEWVAGLFYDGSNKQYADSVKGRFTISRDNSK |
| | | | STLYLQMNSLRAEDTAVYYCARAPYDIWSGYCLDYWG |
| | | | QGTLVTVSS |
| 300 | 4787 | 1091 | FTFSDSGMH |
| 300 | 4788 | 1092 | TTCACCTTCAGTGACAGTGGCATGCAC |
| 300 | 4789 | 1093 | GLFYDGSNKQYADSVKG |
| 300 | 4790 | 1094 | GGTTTATTTTATGATGGAAGTAATAAACAATATGCAG |
| | | | ACTCCGTGAAGGGC |
| 300 | 4791 | 1095 | ARAPYDIWSGYCLDY |
| 300 | 4792 | 1096 | GCGAGAGCCCCTTACGATATTTGGAGTGGTTATTGTCT |
| | | | TGACTAC |
| 300 | 4793 | 1097 | GAAATTGTATTGACACAGTCTCCAGCCACCCTGTATAT |
| | | | GTCTCCAGGGGAAAGAGCCACCCTCTCCTGCAGGGCC |
| | | | AGTCAGAGTGTTAACAACAACTTAGCCTGGTACCAGC |
| | | | AGAGACCTGGCCAGGCTCCCAGGCTCCTCATCTATGG |
| | | | TGCATCTACCAGGGCCACTGGTATCCCAGCCAGGTTC |
| | | | AGTGGCAGTGGGTCTGAGACAGAGTTCACTCTCACTA |
| | | | TCAGCAGCCTGCAGTCTGAAGATTTTGCGGTTTATCAC |
| | | | TGTCAGCAGTATAGTATCTGGCCTCAGACTTTTGGCCA |
| | | | GGGGACCAAGCTGGAGATCAAA |
| 300 | 4794 | 1098 | EIVLTQSPATLYMSPGERATLSCRASQSVNNNLAWYQQ |
| | | | RPGQAPRLLIYGASTRATGIPARFSGSGSETEFTLTISSLQ |
| | | | SEDFAVYHCQQYSIWPQTFGQGTKLEIK |
| 300 | 4795 | 1099 | RASQSVNNNLA |
| 300 | 4796 | 1100 | AGGGCCAGTCAGAGTGTTAACAACAACTTAGCC |
| 300 | 4797 | 1101 | GASTRAT |
| 300 | 4798 | 1102 | GGTGCATCTACCAGGGCCACT |
| 300 | 4799 | 1103 | QQYSIWPQT |
| 300 | 4800 | 1104 | CAGCAGTATAGTATCTGGCCTCAGACT |
| 301 | 4801 | 1105 | CAGGTCCAGCTGGTGCAGTCTGGAGCTGAGGTGAAGA |
| | | | AGCCTGGGGCCTCAGTGAAGGTCTCGTGCAAGACTTC |
| | | | TGGTTACACCTTTTCCAACTACGGTATCAGCTGGCTGC |
| | | | GACAGGCCCCTGGACAAGGGCTTGAGTGGATGGCATG |
| | | | GATCAGCCCTTATAATGGGAACACAAAGTCTGCACAG |
| | | | AGGTTTCAGGGCAGAGTCATCATGACCACAGACACAT |
| | | | CCACGAGGACAGCCCACATGGAGGTGAAGAGCCTGA |
| | | | GAACTGACGACACGGCCACATATTACTGTGCGAGAGA |
| | | | TCCAGCAGTCGATGCAATACCGATGCTTGACTACTGG |
| | | | GGCCAGGGAACCATGGTCACCGTCTCCTCA |
| 301 | 4802 | 1106 | QVQLVQSGAEVKKPGASVKVSCKTSGYTFSNYGISWLR |
| | | | QAPGQGLEWMAWISPYNGNTKSAQRFQGRVIMTTDTST |
| | | | RTAHMEVKSLRTDDTATYYCARDPAVDAIPMLDYWGQ |
| | | | GTMVTVSS |
| 301 | 4803 | 1107 | YTFSNYGIS |
| 301 | 4804 | 1108 | TACACCTTTTCCAACTACGGTATCAGC |
| 301 | 4805 | 1109 | WISPYNGNTKSAQRFQG |
| 301 | 4806 | 1110 | TGGATCAGCCCTTATAATGGGAACACAAAGTCTGCAC |
| | | | AGAGGTTTCAGGGC |
| 301 | 4807 | 1111 | ARDPAVDAIPMLDY |
| 301 | 4808 | 1112 | GCGAGAGATCCAGCAGTCGATGCAATACCGATGCTTG |
| | | | ACTAC |
| 301 | 4809 | 1113 | GAAATTGTGTTGACACAGTCTCCACTCTCCCTGCCCGT |
| | | | CACCCTTGGACAGCCGGCCTCCATCTCCTGCAGGTCTA |
| | | | GTCAAAGCCTCGTGTACACTGATGGAAACACCTACTT |
| | | | GAGCTGGTTTCAGCAGAGGCCAGGCCAATCTCCAAGG |
| | | | CGCCTAATTTATAGGGTTTCTCACCGGGACTCTGGGGT |
| | | | CCCAGACAGATTCACCGGCAGTGGGTCAGGCACTGAT |
| | | | TTCACACTGATAATCCGCAGGGTGGAGGCTGAGGATG |
| | | | TTGGGGTTTATTACTGCATGCAAGGTACACACTGGCCT |
| | | | CTCACTTTCGGCGGAGGGACCAAGGTGGAAATCAAA |
| 301 | 4810 | 1114 | EIVLTQSPLSLPVTLGQPASISCRSSQSLVYTDGNTYLSW |
| | | | FQQRPGQSPRRLIYRVSHRDSGVPDRFTGSGSGTDFTLIIR |
| | | | RVEAEDVGVYYCMQGTHWPLTFGGGTKVEIK |
| 301 | 4811 | 1115 | RSSQSLVYTDGNTYLS |
| 301 | 4812 | 1116 | AGGTCTAGTCAAAGCCTCGTGTACACTGATGGAAACA |
| | | | CCTACTTGAGC |
| 301 | 4813 | 1117 | RVSHRDS |
| 301 | 4814 | 1118 | AGGGTTTCTCACCGGGACTCT |
| 301 | 4815 | 1119 | MQGTHWPLT |
| 301 | 4816 | 1120 | ATGCAAGGTACACACTGGCCTCTCACT |
| 302 | 4817 | 1121 | GAGGTGCAGCTGGTGGAGTCGGGCCCAAGACTGGTGA |
| | | | GGCCTTCGGAGACCCTGTCCCTCACCTGCACTGTCTCT |
| | | | GGAGGCTTCATCAAAACTAGTAGTTACTACTGGGGCT |
| | | | GGATCCGTCAGCCCCCAGGGAAGGGGCTAGAGTGGAT |
| | | | TGGGAGTATCTATTATGCTGGGACCACCTACTACAAC |
| | | | CCGTCCCTCCAGAGTCGAGTCACCATGTCCGTTGACA |
| | | | CGTCGAACAACCAGTTCTCCCTGAAGCTGAACTCTGT |
| | | | GACCGCCGCAGACACGGCTGTATATTACTGTGCGACC |
| | | | GCCTGGACTTTTGACCACTGGGGCCAGGGAACCCTGG |
| | | | TCACTGTCTCCTCA |
| 302 | 4818 | 1122 | EVQLVESGPRLVRPSETLSLTCTVSGGFIKTSSYYWGWIR |
| | | | QPPGKGLEWIGSIYYAGTTYYNPSLQSRVTMSVDTSNNQ |
| | | | FSLKLNSVTAADTAVYYCATAWTFDHWGQGTLVTVSS |
| 302 | 4819 | 1123 | GFIKTSSYYWG |
| 302 | 4820 | 1124 | GGCTTCATCAAAACTAGTAGTTACTACTGGGGC |
| 302 | 4821 | 1125 | SIYYAGTTYYNPSLQS |
| 302 | 4822 | 1126 | AGTATCTATTATGCTGGGACCACCTACTACAACCCGTC |
| | | | CCTCCAGAGT |
| 302 | 4823 | 1127 | ATAWTFDH |
| 302 | 4824 | 1128 | GCGACCGCCTGGACTTTTGACCAC |
| 302 | 4825 | 1129 | GAAATTGTATTGACACAGTCTCCAGCCACCCTGTCCTT |
| | | | GTCTCCAGGGGAAAGAGCCACCCTCTCCTGCAGGGCC |
| | | | AGTCAGAGTCTTAGCAACTACTTAGCCTGGTACCAAC |
| | | | AGAAACCTGGCCAGGCTCCCAGGCTCCTCATCTATGA |
| | | | TGCATCCAACAGGGCCACTGGCATCCCAGCCAGGTTC |
| | | | AGTGGCAGTGGGTCTGGGACAGACTTCACTCTCACCA |
| | | | TCAGCAGCCTAGAGCCTGAAGATTTTGCAGTTTATTAC |
| | | | TGTCAGCTGCGTGGCCACTGGCCCCCCACGATCACCTT |
| | | | CGGCCAAGGGACACGACTGGAGATTAAA |
| 302 | 4826 | 1130 | EIVLTQSPATLSLSPGERATLSCRASQSLSNYLAWYQQKP |
| | | | GQAPRLLIYDASNRATGIPARFSGSGSGTDFTLTISSLEPE |
| | | | DFAVYYCQLRGHWPPTITFGQGTRLEIK |
| 302 | 4827 | 1131 | RASQSLSNYLA |
| 302 | 4828 | 1132 | AGGGCCAGTCAGAGTCTTAGCAACTACTTAGCC |
| 302 | 4829 | 1133 | DASNRAT |
| 302 | 4830 | 1134 | GATGCATCCAACAGGGCCACT |
| 302 | 4831 | 1135 | QLRGHWPPTIT |
| 302 | 4832 | 1136 | CAGCTGCGTGGCCACTGGCCCCCCACGATCACC |
| 303 | 4833 | 107 | CAGGTCCAGCTTGTACAGTCTGGGGGAGGCTTGGTTC |
| | | | AGCCGGGGGGGTCCCTGAGACTCTCCTGTGCAGCCTC |
| | | | TGGATTCGCCTTTAGCGACTATACCATGAGCTGGGTCC |
| | | | GCCAGGCTCCAGGGAAGGGGCTGGAGTGGGTCTCAA |
| | | | GTGTTAGTGGCACGGGTGGTACCTCATACTACGCAGA |
| | | | CTCCGTGAATGGCCGGTTCGCCATCTCCAGAGAGAAT |
| | | | TCCAAGAACACGCTGTTTCTGCAAATGGACAGCCTGA |
| | | | GAGCCGAGGACACGGCCACTTACTACTGTGCCAAAGA |
| | | | TGGGTTGAGGGACGTATCGAGGGTTTATTACATCGAC |
| | | | GTCTGGGGCAAAGGGACCACGGTCACCGTCTCCTCA |
| 303 | 4834 | 1138 | QVQLVQSGGGLVQPGGSLRLSCAASGFAFSDYTMSWVR |
| | | | QAPGKGLEWVSSVSGTGGTSYYADSVNGRFAISRENSK |
| | | | NTLFLQMDSLRAEDTATYYCAKDGLRDVSRVYYIDVW |
| | | | GKGTTVTVSS |
| 303 | 4835 | 1139 | FAFSDYTMS |
| 303 | 4836 | 1140 | TTCGCCTTTAGCGACTATACCATGAGC |
| 303 | 4837 | 1141 | SVSGTGGTSYYADSVNG |
| 303 | 4838 | 1142 | AGTGTTAGTGGCACGGGTGGTACCTCATACTACGCAG |
| | | | ACTCCGTGAATGGC |
| 303 | 4839 | 1143 | AKDGLRDVSRVYYIDV |
| 303 | 4840 | 1144 | GCCAAAGATGGGTTGAGGGACGTATCGAGGGTTTATT |
| | | | ACATCGACGTC |
| 303 | 4841 | 1145 | CAGCCTGTGCTGACTCAGCCTGCCTCCGTGTCTGGGTC |
| | | | TCCTGGACAGTCGATCACCATCTCCTGCACTGGAACC |
| | | | AGCCGTGACATTGGTTCTCATGACTCTGTCTCCTGGTA |
| | | | CCAACAAAAGCCAGGCAAAGCCCCCAAACTCATCATT |
| | | | TATGCAGTCAGAAATCGGCCCTCAGGGCTTTCTAATC |
| | | | GCTTCTCTGGTTCCAAGTCTGGCAACACGGCCTCCCTG |
| | | | ACCATCTCTGGGCTCCAGACTGAAGACGAAGGTGACT |
| | | | ATTACTGCAGCTCATATAGAAACGGCAACGCTCTGGG |
| | | | GGTCTTCGGAACTGGGACCAAGGTCACCGTCCTC |
| 303 | 4842 | 1146 | QPVLTQPASVSGSPGQSITISCTGTSRDIGSHDSVSWYQQ |
| | | | KPGKAPKLIIYAVRNRPSGLSNRFSGSKSGNTASLTISGL |
| | | | QTEDEGDYYCSSYRNGNALGVFGTGTKVTVL |
| 303 | 4843 | 1147 | TGTSRDIGSHDSVS |
| 303 | 4844 | 1148 | ACTGGAACCAGCCGTGACATTGGTTCTCATGACTCTGT |
| | | | CTCC |
| 303 | 4845 | 1149 | AVRNRPS |
| 303 | 4846 | 1150 | GCAGTCAGAAATCGGCCCTCA |
| 303 | 4847 | 1151 | SSYRNGNALGV |
| 303 | 4848 | 1152 | AGCTCATATAGAAACGGCAACGCTCTGGGGGTC |
| 304 | 4849 | 1153 | CAGGTGCAGCTGGTGGAGTCTGGGGGAGGCTTGGTTC |
| | | | AGCCGGGGGGGTCCCTGAGACTCTCCTGTGCAGCCTC |
| | | | TGGATTCGCCTTTAGCAACTATGCCATGAGCTGGGTCC |
| | | | GCCAGGCTCCAGGGAAGGGCCTGGAGTGGGTCTCAAG |
| | | | TGTTAGTGGCACGGGTGGTACCACATACTACGCAGAC |
| | | | TCCGTGAACGGGCGGTTCGCCATCTCCAGAGAGAATT |
| | | | CCAGGAACACCCTCTATCTGCAAATGGATAGCCTGAG |
| | | | AGTCGAGGACACGGCCACTTATTACTGTGCCAAAGAT |
| | | | GGGTTGAGGGACTTATCGAGGGTCTATTACATCGACG |
| | | | TCTGGGGCAAAGGGGCCACGGTCACCGTCTCTTCA |
| 304 | 4850 | 1154 | QVQLVESGGGLVQPGGSLRLSCAASGFAFSNYAMSWVR |
| | | | QAPGKGLEWVSSVSGTGGTTYYADSVNGRFAISRENSR |
| | | | NTLYLQMDSLRVEDTATYYCAKDGLRDLSRVYYIDVW |
| | | | GKGATVTVSS |
| 304 | 4851 | 1155 | FAFSNYAMS |
| 304 | 4852 | 1156 | TTCGCCTTTAGCAACTATGCCATGAGC |
| 304 | 4853 | 1157 | SVSGTGGTTYYADSVNG |
| 304 | 4854 | 1158 | AGTGTTAGTGGCACGGGTGGTACCACATACTACGCAG |
| | | | ACTCCGTGAACGGG |
| 304 | 4855 | 1159 | AKDGLRDLSRVYYIDV |
| 304 | 4856 | 1160 | GCCAAAGATGGGTTGAGGGACTTATCGAGGGTCTATT |
| | | | ACATCGACGTC |
| 304 | 4857 | 1161 | CAGTCTGTCCTGACTCAGCCTGCCTCCGTGTCTGGGTC |
| | | | TCCTGGACAGTCGATCACCATCTCCTGCACTGGAACC |
| | | | AGCCGTGACATTGGTAGTCATGACTATGTCTCCTGGTA |
| | | | CCAACAACACCCAGGCAAAGCCCCCAAACTCATCATT |
| | | | TATGGGGTCAATAATCGGCCCTCAGGACTTTCTAATC |
| | | | GCTTCTCTGGTTCCAAGTCTGGCAACACGGCCTCCCTG |
| | | | ACCATCTCTGGGCTCCAGACTGAAGACGAAGGTGACT |
| | | | ATTACTGCAGCTCATATAGAAACGGCAACACTCTGGG |
| | | | GGTCTTCGGAACTGGGACCAAGCTCACCGTCCTA |
| 304 | 4858 | 1162 | QSVLTQPASVSGSPGQSITISCTGTSRDIGSHDYVSWYQQ |
| | | | HPGKAPKLIIYGVNNRPSGLSNRFSGSKSGNTASLTISGL |
| | | | QTEDEGDYYCSSYRNGNTLGVFGTGTKLTVL |
| 304 | 4859 | 1163 | TGTSRDIGSHDYVS |
| 304 | 4860 | 1164 | ACTGGAACCAGCCGTGACATTGGTAGTCATGACTATG |
| | | | TCTCC |
| 304 | 4861 | 1165 | GVNNRPS |
| 304 | 4862 | 1166 | GGGGTCAATAATCGGCCCTCA |
| 304 | 4863 | 1167 | SSYRNGNTLGV |
| 304 | 4864 | 1168 | AGCTCATATAGAAACGGCAACACTCTGGGGGTC |
| 305 | 4865 | 1169 | CAGGTCCAGCTGGTACAGTCTGGGGCTGAGGTGAAGA |
| | | | AGCCTGGGTCCTCGGTGAAGGTCTCCTGCAAGGCCTC |
| | | | TGGAGGCACCTTCAGCGGCTACGCTATCAACTGGGTG |
| | | | CGACAGGCCCCTGGACAAGGGCTCGAGTGGATGGGA |
| | | | GGGATCATCCATATATTTGGGACAGTAAACTACGCTC |
| | | | CGAAGTTCCAGGGCAGACTCACGATAACCGCGGACGC |
| | | | ATCCACGGGCACAGCCTACATGGAATTGAGCAGCCTG |
| | | | ATGTCTGAGGACACGGCCCTATATTATTGTGCGAGAG |
| | | | ATGCTTACGAAGTGTGGACCGGTTCTTATCTCCCCCCT |
| | | | TTTGACTACTGGGGCCAGGGAACCCTGGTCACCGTCT |
| | | | CCTCA |
| 305 | 4866 | 1170 | QVQLVQSGAEVKKPGSSVKVSCKASGGTFSGYAINWVR |
| | | | QAPGQGLEWMGGIIHIFGTVNYAPKFQGRLTITADASTG |
| | | | TAYMELSSLMSEDTALYYCARDAYEVWTGSYLPPFDY |
| | | | WGQGTLVTVSS |
| 305 | 4867 | 1171 | GTFSGYAIN |
| 305 | 4868 | 1172 | GGCACCTTCAGCGGCTACGCTATCAAC |
| 305 | 4869 | 1173 | GIIHIFGTVNYAPKFQG |
| 305 | 4870 | 1174 | GGGATCATCCATATATTTGGGACAGTAAACTACGCTC |
| | | | CGAAGTTCCAGGGC |
| 305 | 4871 | 1175 | ARDAYEVWTGSYLPPFDY |
| 305 | 4872 | 1176 | GCGAGAGATGCTTACGAAGTGTGGACCGGTTCTTATC |
| | | | TCCCCCCTTTTGACTAC |
| 305 | 4873 | 1177 | GAAACGACACTCACGCAGTCTCCAGGCACCCTGTCTT |
| | | | TGTCTCCCGGGGAAAGAGTCACCCTCTCCTGCAGGGC |
| | | | CAGTCAGACTGTTACAAGCAACTACTTAGCCTGGTAC |
| | | | CAGCAGAAACCTGGCCAGGCTCCCAGGCTCCTCATCT |
| | | | ATGATGCATTCACCAGGGCCACTGGCGTCCCAGCCAG |
| | | | GTTCAGTGGCAGTGGGTCTGGGACAGACTTCACTCTC |
| | | | ACCATCAGCAGACTGGAGCCTGAAGATTTTGCAGTTT |
| | | | ACTATTGTCAGCAGTATGGTAGCTCATTCCTCACTTTC |
| | | | GGCGGAGGGACCAAGGTGGAAATCAAA |
| 305 | 4874 | 1178 | ETTLTQSPGTLSLSPGERVTLSCRASQTVTSNYLAWYQQ |
| | | | KPGQAPRLLIYDAFTRATGVPARFSGSGSGTDFTLTISRL |
| | | | EPEDFAVYYCQQYGSSFLTFGGGTKVEIK |
| 305 | 4875 | 1179 | RASQTVTSNYLA |
| 305 | 4876 | 1180 | AGGGCCAGTCAGACTGTTACAAGCAACTACTTAGCC |
| 305 | 4877 | 1181 | DAFTRAT |
| 305 | 4878 | 1182 | GATGCATTCACCAGGGCCACT |
| 305 | 4879 | 1183 | QQYGSSFLT |
| 305 | 4880 | 1184 | CAGCAGTATGGTAGCTCATTCCTCACT |
| 306 | 4881 | 1185 | GAGGTGCAGCTGGTGGAGTCTGGGGGAGGCGTGGTCC |
| | | | AGTCTGGGAGGTCCCTGAGACTCTCCTGTGCAGCATC |
| | | | TGGATTCATCTTCAGTGACAATGGCATGCACTGGGTC |
| | | | CGCCAGGCTCCAGGCAAGGGGCTGGAGTGGGTGGCA |
| | | | GGTATTTTTTATGATGGAAGTAATAAACAATATGCAG |
| | | | ACTCCGTGAAGGGCCGATTCACCATCTCCAGAGACAA |
| | | | TTCCAAGAACACACTGTATCTGCAAATGAAGAGCCTG |
| | | | AGAGCCGAGGACACGGCTGTGTATTACTGTGCGAGAG |
| | | | CCCCTTACGATATCTGGAGTGGTTATTGTCTTGACTAC |
| | | | TGGGGCCAGGGAACCCTGGTCACCGTCTCCTCA |
| 306 | 4882 | 1186 | EVQLVESGGGVVQSGRSLRLSCAASGFIFSDNGMHWVR |
| | | | QAPGKGLEWVAGIFYDGSNKQYADSVKGRFTISRDNSK |
| | | | NTLYLQMKSLRAEDTAVYYCARAPYDIWSGYCLDYWG |
| | | | QGTLVTVSS |
| 306 | 4883 | 1187 | FIFSDNGMH |
| 306 | 4884 | 1188 | TTCATCTTCAGTGACAATGGCATGCAC |
| 306 | 4885 | 1189 | GIFYDGSNKQYADSVKG |
| 306 | 4886 | 1190 | GGTATTTTTTATGATGGAAGTAATAAACAATATGCAG |
| | | | ACTCCGTGAAGGGC |
| 306 | 4887 | 1191 | ARAPYDIWSGYCLDY |
| 306 | 4888 | 1192 | GCGAGAGCCCCTTACGATATCTGGAGTGGTTATTGTCT |
| | | | TGACTAC |
| 306 | 4889 | 1193 | GACATCCAGGTGACCCAGTCTCCAGCCACCCTGTCTA |
| | | | TGTCTCCAGGGGAAAGAGCCACCCTCTCCTGCAGGGC |
| | | | CAGTCAGAGTGTTAACAACAACTTAGCCTGGTACCAG |
| | | | CAGAGACCTGGCCAGGCTCCCAGGCTCCTCATCTATG |
| | | | GTGCATCTACGAGGGCCACTGGTATCCCAGCCAGGTT |
| | | | CAGTGGCAGTGGGTCTGAGACAGAGTTCACTCTCACT |
| | | | ATCAGCAGCCTGCAGTCTGAAGATTTTGCGGTTTATCA |
| | | | CTGTCAGCAGTATAGTATCTGGCCTCAGACTTTTGGCC |
| | | | AGGGGACCAAGGTGGAAATCAAA |
| 306 | 4890 | 1194 | DIQVTQSPATLSMSPGERATLSCRASQSVNNNLAWYQQ |
| | | | RPGQAPRLLIYGASTRATGIPARFSGSGSETEFTLTISSLQ |
| | | | SEDFAVYHCQQYSIWPQTFGQGTKVEIK |
| 306 | 4891 | 1195 | RASQSVNNNLA |
| 306 | 4892 | 1196 | AGGGCCAGTCAGAGTGTTAACAACAACTTAGCC |
| 306 | 4893 | 1197 | GASTRAT |
| 306 | 4894 | 1198 | GGTGCATCTACGAGGGCCACT |
| 306 | 4895 | 1199 | QQYSIWPQT |
| 306 | 4896 | 1200 | CAGCAGTATAGTATCTGGCCTCAGACT |
| 307 | 4897 | 1201 | CAGGTCCAGCTTGTACAGTCTGGGGCTGAACTAAAGA |
| | | | AGCCTGGCTCCTCGGTGAAAGTCTCCTGCAAGGCTTCT |
| | | | GCAGACACCTTCAAAAGTTATGCTATCAACTGGGTGC |
| | | | GGCAGGCCCCTGGACAAGGACTTGAGTGGATGGGAG |
| | | | AGTTCATCCCAATCTTTGGTGTCTCACCCTCCGCACAG |
| | | | AAGTTCCAGGGCAGAGTCACCATTACCGCGGACAGAT |
| | | | CCACGTCCACAGCCTACATGGAGTTGAGCAGCCTGAA |
| | | | ATCTGATGACTCGGCCATTTATTACTGTGCGACACGTC |
| | | | TGTATACGTTGGGGTCCCCTTTTGACAATTGGGGCCAG |
| | | | GGGACCACGGTCACCGTCTCCTCA |
| 307 | 4898 | 1202 | QVQLVQSGAELKKPGSSVKVSCKASADTFKSYAINWVR |
| | | | QAPGQGLEWMGEFIPIFGVSPSAQKFQGRVTITADRSTST |
| | | | AYMELSSLKSDDSAIYYCATRLYTLGSPFDNWGQGTTV |
| | | | TVSS |
| 307 | 4899 | 1203 | DTFKSYAIN |
| 307 | 4900 | 1204 | GACACCTTCAAAAGTTATGCTATCAAC |
| 307 | 4901 | 1205 | EFIPIFGVSPSAQKFQG |
| 307 | 4902 | 1206 | GAGTTCATCCCAATCTTTGGTGTCTCACCCTCCGCACA |
| | | | GAAGTTCCAGGGC |
| 307 | 4903 | 1207 | ATRLYTLGSPFDN |
| 307 | 4904 | 1208 | GCGACACGTCTGTATACGTTGGGGTCCCCTTTTGACAA |
| | | | T |
| 307 | 4905 | 1209 | CAGCCTGTGCTGACTCAGCCTCGCTCAGTGTCCGGGTC |
| | | | TCCTGGACAGTCAGTCACCATCTCCTGCACTGGAACC |
| | | | AGTAGTGATGTTGGTGATTATGACTATGTCTCCTGGTA |
| | | | CCAACACCTCCCAGGCGAAGTCCCCAAACTCATAGTT |
| | | | TATAATGTCATTAAGCGGCCCTCTGGGGTCCCTGATCG |
| | | | CTTCTCTGGCTCCAAGTCTGGCAACACGGCCTCCCTGA |
| | | | CCATCTCTGGGCTCCAGGCTGAGGATGAGGCTGACTA |
| | | | TTACTGCTGCTCATATGCAGGCAGGTATATTTATGTCT |
| | | | TCGGCAGTGGGACCAAGCTCACCGTCCTA |
| 307 | 4906 | 1210 | QPVLTQPRSVSGSPGQSVTISCTGTSSDVGDYDYVSWYQ |
| | | | HLPGEVPKLIVYNVIKRPSGVPDRFSGSKSGNTASLTISG |
| | | | LQAEDEADYYCCSYAGRYIYVFGSGTKLTVL |
| 307 | 4907 | 1211 | TGTSSDVGDYDYVS |
| 307 | 4908 | 1212 | ACTGGAACCAGTAGTGATGTTGGTGATTATGACTATG |
| | | | TCTCC |
| 307 | 4909 | 1213 | NVIKRPS |
| 307 | 4910 | 1214 | AATGTCATTAAGCGGCCCTCT |
| 307 | 4911 | 1215 | CSYAGRYIYV |
| 307 | 4912 | 1216 | TGCTCATATGCAGGCAGGTATATTTATGTC |
| 308 | 4913 | 1217 | GAGGTGCAGCTGTTGGAGTCTGGGGGAGGCCTGGTCA |
| | | | AGCCTGGGGAGTCCCTGAGACTCTCCTGTGCAGCCTC |
| | | | TGGATTCACCCTTAGTGGCTACTACATGAATTGGGTCC |
| | | | GCCAGGCTCCAGGGAGGGGGCTGGAGTGGGTCTCCTC |
| | | | CATTAGTGGTGGTAGTAATTACATAAACTACGCCGAC |
| | | | TCAGTGAAGGGCCGGTTCACCATCTCCAGAGACAACG |
| | | | CCAAGAACTCACTCTATCTGCAAATGAACAGCCTGAG |
| | | | AGTCGAGGACACGGCTGTCTATTACTGTGCGAGGGTC |
| | | | CACGTGGATTTAGTGACTACGATTTTTGGGGTTGACTT |
| | | | TGACTTCTGGGGCCAGGGAACCCTGGTCACTGTCTCCT |
| | | | CA |
| 308 | 4914 | 1218 | EVQLLESGGGLVKPGESLRLSCAASGFTLSGYYMNWVR |
| | | | QAPGRGLEWVSSISGGSNYINYADSVKGRFTISRDNAKN |
| | | | SLYLQMNSLRVEDTAVYYCARVHVDLVTTIFGVDFDFW |
| | | | GQGTLVTVSS |
| 308 | 4915 | 1219 | FTLSGYYMN |
| 308 | 4916 | 1220 | TTCACCCTTAGTGGCTACTACATGAAT |
| 308 | 4917 | 1221 | SISGGSNYINYADSVKG |
| 308 | 4918 | 1222 | TCCATTAGTGGTGGTAGTAATTACATAAACTACGCCG |
| | | | ACTCAGTGAAGGGC |
| 308 | 4919 | 1223 | ARVHVDLVTTIFGVDFDF |
| 308 | 4920 | 1224 | GCGAGGGTCCACGTGGATTTAGTGACTACGATTTTTG |
| | | | GGGTTGACTTTGACTTC |
| 308 | 4921 | 1225 | CAGTCTGTGCTGACGCAGCCGCCCTCAGTGTCTGGGG |
| | | | CCCCAGGGCAGAGGGTCACCATCTCCTGCACTGGGAG |
| | | | CAGCTCCAACATCGGGGCAGGGTATGATGTACACTGG |
| | | | TACCAGCAACTTCCAGGAACAGCCCCCAAACTCCTCA |
| | | | TCTATGGTAACACCAATCGGCCCGCAGGGGTCCCTGA |
| | | | CCGATTCTCTGGCTCCAAGTCTGGCTCCTCAGCCTCCC |
| | | | TGGCCATCACTGGGCTCCAGGCTGAGGATGAGGCTGA |
| | | | TTATTACTGCCAGTCGTATGACAGCAGCCTGAGTGGT |
| | | | GCGATCTTCGGCGGAGGGACCAAGCTCACCGTCCTA |
| 308 | 4922 | 1226 | QSVLTQPPSVSGAPGQRVTISCTGSSSNIGAGYDVHWYQ |
| | | | QLPGTAPKLLIYGNTNRPAGVPDRFSGSKSGSSASLAITG |
| | | | LQAEDEADYYCQSYDSSLSGAIFGGGTKLTVL |
| 308 | 4923 | 1227 | TGSSSNIGAGYDVH |
| 308 | 4924 | 1228 | ACTGGGAGCAGCTCCAACATCGGGGCAGGGTATGATG |
| | | | TACAC |
| 308 | 4925 | 1229 | GNTNRPA |
| 308 | 4926 | 1230 | GGTAACACCAATCGGCCCGCA |
| 308 | 4927 | 1231 | QSYDSSLSGAI |
| 308 | 4928 | 1232 | CAGTCGTATGACAGCAGCCTGAGTGGTGCGATC |
| 309 | 4929 | 1233 | CAGGTGCAGCTGCAGGAGTCCGGAGCTGAGGTGAAG |
| | | | ATGCGTGGGGCCTCAGTGAAGGTCTCCTGCAAGGCTT |
| | | | CTGGTTACACCTTTAGTCACTATGGTATCAGTTGGGTG |
| | | | CGACAGGCCCCTGGACAAGGGCTCGAGTGGATGGGAT |
| | | | TTATCAGCGCTTACAATCATAACACAAAGTATGCACA |
| | | | GACCGTCCAGGGCAGAGTCACCTTGAGCACAGACACA |
| | | | TCCACGAGCACAGCCTACATGGAGCTGAGGAGCCTGA |
| | | | GACCTGACGACACGGCCATGTATTACTGTGCGAGAGA |
| | | | ACCCCCGAGTGACGATGCTGCAAGGCTCTTTGACTAC |
| | | | TGGGGCCAGGGAACCCTGGTCACTGTCTCCTCA |
| 309 | 4930 | 1234 | QVQLQESGAEVKMRGASVKVSCKASGYTFSHYGISWVR |
| | | | QAPGQGLEWMGFISAYNHNTKYAQTVQGRVTLSTDTST |
| | | | STAYMELRSLRPDDTAMYYCAREPPSDDAARLFDYWG |
| | | | QGTLVTVSS |
| 309 | 4931 | 1235 | YTFSHYGIS |
| 309 | 4932 | 1236 | TACACCTTTAGTCACTATGGTATCAGT |
| 309 | 4933 | 1237 | FISAYNHNTKYAQTVQG |
| 309 | 4934 | 1238 | TTTATCAGCGCTTACAATCATAACACAAAGTATGCAC |
| | | | AGACCGTCCAGGGC |
| 309 | 4935 | 1239 | AREPPSDDAARLFDY |
| 309 | 4936 | 1240 | GCGAGAGAACCCCCGAGTGACGATGCTGCAAGGCTCT |
| | | | TTGACTAC |
| 309 | 4937 | 1241 | GAAACGACACTCACGCAGTCTCCACGCTCCCTGCCCG |
| | | | TCACCCTTGGACAGCCGGCCTCCATCTCCTGCAGGTCT |
| | | | AGTCAAAGCCTCGTGTACAGTGAAGGAAACACCTACT |
| | | | TGAGTTGGTTTCAGCAGAGGCCAGGCCAATCTCCAAG |
| | | | GCGCCTAATTTATAAGGTTTCTAACCGGGACTCTGGG |
| | | | GTCCCAGACAGATTCAGCGGCAGTGGGTCAGGCACTG |
| | | | ATTTCACACTGAAAATCAGCAGGGTGGAGGCTGAGGA |
| | | | TGTTGGGGTTTATTATTGCATGCAAGGTACACAGTGG |
| | | | CCTGTGACATTCGGCCAAGGGACCAAGGTGGAAATCA |
| | | | AA |
| 309 | 4938 | 1242 | ETTLTQSPRSLPVTLGQPASISCRSSQSLVYSEGNTYLSW |
| | | | FQQRPGQSPRRLIYKVSNRDSGVPDRFSGSGSGTDFTLKI |
| | | | SRVEAEDVGVYYCMQGTQWPVTFGQGTKVEIK |
| 309 | 4939 | 1243 | RSSQSLVYSEGNTYLS |
| 309 | 4940 | 1244 | AGGTCTAGTCAAAGCCTCGTGTACAGTGAAGGAAACA |
| | | | CCTACTTGAGT |
| 309 | 4941 | 1245 | KVSNRDS |
| 309 | 4942 | 1246 | AAGGTTTCTAACCGGGACTCT |
| 309 | 4943 | 1247 | MQGTQWPVT |
| 309 | 4944 | 1248 | ATGCAAGGTACACAGTGGCCTGTGACA |
| 310 | 4945 | 1249 | CAGGTCCAGCTGGTACAGTCTGGGGCTGAGGTGAAGA |
| | | | AGCCTGGGGCCTCAGTGAGGGTCTCCTGCAAGGTTTA |
| | | | CGGTCACACCCTCAGTGAATTATCCATGCACTGGGTG |
| | | | CGACAGGGTCCTGAAGGAGGCCTTGAGTGGATGGGA |
| | | | GCTTTTGATCATGAAGATGGTGAAGGAATCTACCCAC |
| | | | AGAAGTTCCAGGGCAGAATCACCATGACCGCGGACAT |
| | | | ATCGACAGACACAGCCCACATGGAACTGAGGAGCCTC |
| | | | AGATCTGAGGACACGGCCGTTTATTACTGTGCAACAC |
| | | | CGACCCCGGTTGGAGCAACGGACTTCTGGGGCCAGGG |
| | | | AACCCTGGTCACCGTCTCCTCA |
| 310 | 4946 | 1250 | QVQLVQSGAEVKKPGASVRVSCKVYGHTLSELSMHWV |
| | | | RQGPEGGLEWMGAFDHEDGEGIYPQKFQGRITMTADIS |
| | | | TDTAHMELRSLRSEDTAVYYCATPTPVGATDFWGQGTL |
| | | | VTVSS |
| 310 | 4947 | 1251 | HTLSELSMH |
| 310 | 4948 | 1252 | CACACCCTCAGTGAATTATCCATGCAC |
| 310 | 4949 | 1253 | AFDHEDGEGIYPQKFQG |
| 310 | 4950 | 1254 | GCTTTTGATCATGAAGATGGTGAAGGAATCTACCCAC |
| | | | AGAAGTTCCAGGGC |
| 310 | 4951 | 1255 | ATPTPVGATDF |
| 310 | 4952 | 1256 | GCAACACCGACCCCGGTTGGAGCAACGGACTTC |
| 310 | 4953 | 1257 | GACATCCGGGTGACCCAGTCTCCATCCTCCCTGTCTGC |
| | | | ATCTGTAGGAGACAGAGTCACCATCACTTGCCGGGCA |
| | | | AGTCAGAGCATTAGCAGCTACTTAAATTGGTATCAAC |
| | | | AGAAACCAGGAAAAGCCCCTAAGCTCCTGATCTATGC |
| | | | TGCATCCACTTTGCAGAGGGGGGGCCCATCAAGATTC |
| | | | AGTGGCAGTGGATCTGGGACAGATTTCACTCTCAGCA |
| | | | TCAGCAGTCTGCAACCTGAAGATTTTGCAACTTACTAT |
| | | | TGTCAACAGACTTACATTATTCCATACACTTTTGGCCA |
| | | | GGGGACCAAGCTGGAGATCAAA |
| 310 | 4954 | 1258 | DIRVTQSPSSLSASVGDRVTITCRASQSISSYLNWYQQKP |
| | | | GKAPKLLIYAASTLQRGGPSRFSGSGSGTDFTLSISSLQPE |
| | | | DFATYYCQQTYIIPYTFGQGTKLEIK |
| 310 | 4955 | 1259 | RASQSISSYLN |
| 310 | 4956 | 1260 | CGGGCAAGTCAGAGCATTAGCAGCTACTTAAAT |
| 310 | 4957 | 1261 | AASTLQR |
| 310 | 4958 | 1262 | GCTGCATCCACTTTGCAGAGG |
| 310 | 4959 | 1263 | QQTYIIPYT |
| 310 | 4960 | 1264 | CAACAGACTTACATTATTCCATACACT |
| 311 | 4961 | 1265 | CAGGTGCAGCTGCAGGAGTCGGGCCCGGGACTGGTGA |
| | | | AGCCTTCGGAGACCCTGTCCCTCACCTGCAGTGTCTCT |
| | | | GGTGGCTCCATCACCAATGTTAATTACTACTGGGGCT |
| | | | GGATCCGCCAGCCCCCCGGGAAGGGCCTGGAGTGGAT |
| | | | TGGGAGTATCTATTATAATGGAAACACCTACTACAAC |
| | | | CCGTCCCTCCAGAGTCGAGTCACCATGTCCGTGGACA |
| | | | CGTCCAAGAACCACTTCTCCCTGAGGCTGACGTCTGT |
| | | | GACCGCCGCAGACACGGCTGTATATTTTTGTGCGAGA |
| | | | GAGGGGCCTAATTGGGAATTGTTGAATGCTTTCGATA |
| | | | TCTGGGGCCAAGGGACCACGGTCACCGTCTCCTCA |
| 311 | 4962 | 1266 | QVQLQESGPGLVKPSETLSLTCSVSGGSITNVNYYWGWI |
| | | | RQPPGKGLEWIGSIYYNGNTYYNPSLQSRVTMSVDTSKN |
| | | | HFSLRLTSVTAADTAVYFCAREGPNWELLNAFDIWGQG |
| | | | TTVTVSS |
| 311 | 4963 | 1267 | GSITNVNYYWG |
| 311 | 4964 | 1268 | GGCTCCATCACCAATGTTAATTACTACTGGGGC |
| 311 | 4965 | 1269 | SIYYNGNTYYNPSLQS |
| 311 | 4966 | 1270 | AGTATCTATTATAATGGAAACACCTACTACAACCCGT |
| | | | CCCTCCAGAGT |
| 311 | 4967 | 1271 | AREGPNWELLNAFDI |
| 311 | 4968 | 1272 | GCGAGAGAGGGGCCTAATTGGGAATTGTTGAATGCTT |
| | | | TCGATATC |
| 311 | 4969 | 1273 | GACATCCAGGTGACCCAGCCACCCTCGGTGTCAGTGG |
| | | | CCCCAGGACAGACGGCCAGGATTACCTGTGGGGGAA |
| | | | ACAACATTGGAAGTAAAAATGTGCACTGGTACCAGCA |
| | | | GAAGCCAGGCCGGGCCCCTGTCTTGGTCGTCTATGAG |
| | | | GATACCCACCGGCCCTCAGGGATCCCTGAGCGATTCT |
| | | | CTGGCTCCAACTCTGGGAACACGGCCACCCTGACCAT |
| | | | CAGTAGGGTCGAAGCCGGGGATGAGGCCGACTATTAC |
| | | | TGTCAGGTGTGGGATACTAGTAGTGATCATGTGGTAT |
| | | | TCGGCGGAGGGACCAAGCTCACCGTCCTA |
| 311 | 4970 | 1274 | DIQVTQPPSVSVAPGQTARITCGGNNIGSKNVHWYQQKP |
| | | | GRAPVLVVYEDTHRPSGIPERFSGSNSGNTATLTISRVEA |
| | | | GDEADYYCQVWDTSSDHVVFGGGTKLTVL |
| 311 | 4971 | 1275 | GGNNIGSKNVH |
| 311 | 4972 | 1276 | GGGGGAAACAACATTGGAAGTAAAAATGTGCAC |
| 311 | 4973 | 1277 | EDTHRPS |
| 311 | 4974 | 1278 | GAGGATACCCACCGGCCCTCA |
| 311 | 4975 | 1279 | QVWDTSSDHVV |
| 311 | 4976 | 1280 | CAGGTGTGGGATACTAGTAGTGATCATGTGGTA |
| 312 | 4977 | 1281 | CAGGTCCAGCTGGTGCAGTCTGGGGGAGGCCTGGTCA |
| | | | AGCCTGAGGGGTCCCTGAGACTCTCCTGTGCAGCCTC |
| | | | TGGATTCACCTTCAGTAGCTATAGCATGAACTGGGTC |
| | | | CGCCAGGCTCCAGGGAAGGGGCTGGAGTGGGTCTCAT |
| | | | CCATTAGTAGTAGTAGTAGTTACATATACTACGCAGA |
| | | | CTCAGTGAAGGGCCGATTCACCATCTCCAGAGACAAC |
| | | | GCCAAGAACTCACTGTATCTGCAAATGAACAGCCTGA |
| | | | GAGCCGAGGACACGGCTGTGTATTACTGTGCGAGAGT |
| | | | CTCAACAGAATTGGGCTACTACTACATGGACGTCTGG |
| | | | GGCAAAGGGACCACGGTCACTGTCTCCTCA |
| 312 | 4978 | 1282 | QVQLVQSGGGLVKPEGSLRLSCAASGFTFSSYSMNWVR |
| | | | QAPGKGLEWVSSISSSSSYIYYADSVKGRFTISRDNAKNS |
| | | | LYLQMNSLRAEDTAVYYCARVSTELGYYYMDVWGKG |
| | | | TTVTVSS |
| 312 | 4979 | 1283 | FTFSSYSMN |
| 312 | 4980 | 1284 | TTCACCTTCAGTAGCTATAGCATGAAC |
| 312 | 4981 | 1285 | SISSSSSYIYYADSVKG |
| 312 | 4982 | 1286 | TCCATTAGTAGTAGTAGTAGTTACATATACTACGCAG |
| | | | ACTCAGTGAAGGGC |
| 312 | 4983 | 1287 | ARVSTELGYYYMDV |
| 312 | 4984 | 1288 | GCGAGAGTCTCAACAGAATTGGGCTACTACTACATGG |
| | | | ACGTC |
| 312 | 4985 | 1289 | CAGTCTGTCCTGACGCAGCCGCCCTCAGTGTCTGGGG |
| | | | CCCCAGGGCAGAGGGTCACCATCTCCTGCACTGGGAG |
| | | | CAGCTCCAACATCGGGGCAGGTTATGATGTACACTGG |
| | | | TACCAGCAGCTTCCAGGAACAGCCCCCAAACTCCTCA |
| | | | TCTATGGTAACAGCAATCGGCCCTCAGGGGTCCCTGA |
| | | | CCGATTCTCTGGCTCCAAGTCTGGCACCTCAGCCTCCC |
| | | | TGGCCATCACTGGGCTCCAGGCTGAGGATGAGGCTGA |
| | | | TTATTACTGCCAGTCCTATGACAGCAGCCTGAGTGTG |
| | | | GTATTCGGCGGAGGGACCAAGCTGACCGTCCTA |
| 312 | 4986 | 1290 | QSVLTQPPSVSGAPGQRVTISCTGSSSNIGAGYDVHWYQ |
| | | | QLPGTAPKLLIYGNSNRPSGVPDRFSGSKSGTSASLAITG |
| | | | LQAEDEADYYCQSYDSSLSVVFGGGTKLTVL |
| 312 | 4987 | 1291 | TGSSSNIGAGYDVH |
| 312 | 4988 | 1292 | ACTGGGAGCAGCTCCAACATCGGGGCAGGTTATGATG |
| | | | TACAC |
| 312 | 4989 | 1293 | GNSNRPS |
| 312 | 4990 | 1294 | GGTAACAGCAATCGGCCCTCA |
| 312 | 4991 | 1295 | QSYDSSLSVV |
| 312 | 4992 | 1296 | CAGTCCTATGACAGCAGCCTGAGTGTGGTA |
| 313 | 4993 | 1297 | CAGGTCCAGCTTGTACAGTCTGGGGCTGAGGTGAAGA |
| | | | AGCCTGGGGCCTCAGTGAAGATTTCCTGCAAGGCTTC |
| | | | GGGATACCCCTTCAGTTCCTATCCTATGCATTGGGTGC |
| | | | GCCAGGCCCCCGGACAAAGGCTTGAGTGGATGGGATG |
| | | | GATCAACGTTGACAATGAGAACACAAAATATTCATGG |
| | | | AAGTTCCGGGGCAGAGTCACCATTACCAGGGACACAT |
| | | | CCGCGAGCACAGTTTACATGGAGCTGAGCAGTCTGAT |
| | | | ATCTGAAGACACGGCTGTGTATTACTGTGGGAGAGAC |
| | | | TGGGACGGGGCGATCCGTGTCTTGGACTACTGGGGCC |
| | | | AGGGAACCCTGGTCACCGTCTCCTCA |
| 313 | 4994 | 1298 | QVQLVQSGAEVKKPGASVKISCKASGYPFSSYPMHWVR |
| | | | QAPGQRLEWMGWINVDNENTKYSWKFRGRVTITRDTS |
| | | | ASTVYMELSSLISEDTAVYYCGRDWDGAIRVLDYWGQG |
| | | | TLVTVSS |
| 313 | 4995 | 1299 | YPFSSYPMH |
| 313 | 4996 | 1300 | TACCCCTTCAGTTCCTATCCTATGCAT |
| 313 | 4997 | 1301 | WINVDNENTKYSWKFRG |
| 313 | 4998 | 1302 | TGGATCAACGTTGACAATGAGAACACAAAATATTCAT |
| | | | GGAAGTTCCGGGGC |
| 313 | 4999 | 1303 | GRDWDGAIRVLDY |
| 313 | 5000 | 1304 | GGGAGAGACTGGGACGGGGCGATCCGTGTCTTGGACT |
| | | | AC |
| 313 | 5001 | 1305 | GATATTGTGATGACTCAGACTCCAGACTCCCTGGCTGT |
| | | | GTCTCTGGGCGAGAGGGCCACCATCACCTGCAAGTCC |
| | | | AGCCAGAGTGTTTTATTCAGCTCCGACAATAAGAACT |
| | | | ACTTAGCTTGGTACCAGCAGAAACCGGGACAGCCTCC |
| | | | TAAATTGCTCATTTACTGGGCATCTATCCGGGAATCCG |
| | | | GGGTCCCTGACCGATTCGGTGGCAGCGGGTCTGGGAC |
| | | | ACATTTCACTCTCACCATCACCAGCGTGCAGGCTGCA |
| | | | GATGTGGCAGTTTATTACTGTCAGCAATATTATGGTAA |
| | | | TTTCCCCACCTTCGGCCAAGGGACACGACTGGAGATT |
| | | | AAA |
| 313 | 5002 | 1306 | DIVMTQTPDSLAVSLGERATITCKSSQSVLFSSDNKNYLA |
| | | | WYQQKPGQPPKLLIYWASIRESGVPDRFGGSGSGTHFTL |
| | | | TITSVQAADVAVYYCQQYYGNFPTFGQGTRLEIK |
| 313 | 5003 | 1307 | KSSQSVLFSSDNKNYLA |
| 313 | 5004 | 008 | AAGTCCAGCCAGAGTGTTTTATTCAGCTCCGACAATA |
| | | | AGAACTACTTAGCT |
| 313 | 5005 | 1309 | WASIRES |
| 313 | 5006 | 1310 | TGGGCATCTATCCGGGAATCC |
| 313 | 5007 | 1311 | QQYYGNFPT |
| 313 | 5008 | 1312 | CAGCAATATTATGGTAATTTCCCCACC |
| 314 | 5009 | 1313 | CAGGTCCAGCTGGTGCAGTCTGGGGGAGGCGTGGTCC |
| | | | AGCCTGGGAGGTCCCTGAGACTTTCCTGTGCAGCCTCT |
| | | | GGATTCACCTTCAGAAACTATGGCATGCACTGGGTCC |
| | | | GCCAGGCTCCAGGCAAGGGGCTGGAGTGGGTAGCGG |
| | | | CTGCATCGTATGATGGGAGTAGTAAGTACTTTGCAGA |
| | | | CGCCGTGAAGGGCCGATTCAGCATCTCCAGAGACAAT |
| | | | ACCAAGAACACGCTGTCTCTGCAAATGACCAGCCTGA |
| | | | GAGCTGAGGACACGGCTGTGTATTACTGTGCAAGAGA |
| | | | CCCCGGAGTGGGAAGTTATTATAACGTGGTGGGTATG |
| | | | GACGTCTGGGGCCAAGGGACCACGGTCACCGTCTCCT |
| | | | CA |
| 314 | 5010 | 1314 | QVQLVQSGGGVVQPGRSLRLSCAASGFTFRNYGMHWV |
| | | | RQAPGKGLEWVAAASYDGSSKYFADAVKGRFSISRDNT |
| | | | KNTLSLQMTSLRAEDTAVYYCARDPGVGSYYNVVGMD |
| | | | VWGQGTTVTVSS |
| 314 | 5011 | 1315 | FTFRNYGMH |
| 314 | 5012 | 1316 | TTCACCTTCAGAAACTATGGCATGCAC |
| 314 | 5013 | 1317 | AASYDGSSKYFADAVKG |
| 314 | 5014 | 1318 | GCTGCATCGTATGATGGGAGTAGTAAGTACTTTGCAG |
| | | | ACGCCGTGAAGGGC |
| 314 | 5015 | 1319 | ARDPGVGSYYNVVGMDV |
| 314 | 5016 | 1320 | GCAAGAGACCCCGGAGTGGGAAGTTATTATAACGTGG |
| | | | TGGGTATGGACGTC |
| 314 | 5017 | 1321 | GACATCCGGTTGACCCAGTCTCCACTCTCCCTGCCCGT |
| | | | CACCCTTGGACAGCCGGCCTCCATCTCCTGCAGGTCTA |
| | | | GTCAAAGCCTCGTATACAGTGATGGAAACACCTACTT |
| | | | GAATTGGTTTCAGCAGAGGCCAGGCCAATCTCCAAGG |
| | | | CGCCTAATTTATAGGGTTTCTCACCGGGACTCTGGGGT |
| | | | CCCAGACAGATTCAGCGGCAGTGAGTCAGGCACTGAT |
| | | | TTCACACTGAAAATCAGCAGGGTGGAGGCTGAGGATG |
| | | | TTGGCGTTTATTACTGCATGCAAGGTACACACTGGCCT |
| | | | CCTACGTTCGGCCAAGGGACCAAGGTGGAGATCAAA |
| 314 | 5018 | 1322 | DIRLTQSPLSLPVTLGQPASISCRSSQSLVYSDGNTYLNW |
| | | | FQQRPGQSPRRLIYRVSHRDSGVPDRFSGSESGTDFTLKI |
| | | | SRVEAEDVGVYYCMQGTHWPPTFGQGTKVEIK |
| 314 | 5019 | 1323 | RSSQSLVYSDGNTYLN |
| 314 | 5020 | 1324 | AGGTCTAGTCAAAGCCTCGTATACAGTGATGGAAACA |
| | | | CCTACTTGAAT |
| 314 | 5021 | 1325 | RVSHRDS |
| 314 | 5022 | 1326 | AGGGTTTCTCACCGGGACTCT |
| 314 | 5023 | 1327 | MQGTHWPPT |
| 314 | 5024 | 1328 | ATGCAAGGTACACACTGGCCTCCTACG |
| 315 | 5025 | 1329 | CAGGTCCAGCTGGTGCAGTCTGGGGCTGAGGTGAAGA |
| | | | AGCCTGGGGCCTCAGTGAAGGTCGCCTGCAAGGTTTC |
| | | | CGGATCCAGCCTCACTGAATTGTCCATTCAATGGGTG |
| | | | CGCTTGCCTCCTGGCAAACGCCTTGAGTGGCTGGGAG |
| | | | CTTTTGATGCTGAAGATGGTGCACCAATCTACTCACCG |
| | | | AAATTCCAGGGCAGAGTCACCATGACCGAGGACAGAT |
| | | | CGACAGAGACAGCCTACATGGAGGTGACCAGCCTGA |
| | | | GATCTGAGGACACGGCCCTCTATTACTGTGCGACTCC |
| | | | CCTTCCCGCGGGAGCCCTTGACAAGTGGGGCCAGGGA |
| | | | ACCCTGGTCACCGTCTCCTCA |
| 315 | 5026 | 1330 | QVQLVQSGAEVKKPGASVKVACKVSGSSLTELSIQWVR |
| | | | LPPGKRLEWLGAFDAEDGAPIYSPKFQGRVTMTEDRSTE |
| | | | TAYMEVTSLRSEDTALYYCATPLPAGALDKWGQGTLVT |
| | | | VSS |
| 315 | 5027 | 1331 | SSLTELSIQ |
| 315 | 5028 | 1332 | TCCAGCCTCACTGAATTGTCCATTCAA |
| 315 | 5029 | 1333 | AFDAEDGAPIYSPKFQG |
| 315 | 5030 | 1334 | GCTTTTGATGCTGAAGATGGTGCACCAATCTACTCACC |
| | | | GAAATTCCAGGGC |
| 315 | 5031 | 1335 | ATPLPAGALDK |
| 315 | 5032 | 1336 | GCGACTCCCCTTCCCGCGGGAGCCCTTGACAAG |
| 315 | 5033 | 1337 | GACATCCAGATGACCCAGTCTCCATCCTCCCTGTCTGC |
| | | | TTCCGTAGGAGACAGAGTCACCATCTCTTGCCGGGCA |
| | | | AGTCAGACTATAAGCAGATATTTAAATTGGTATCAGG |
| | | | TCAAGCCAGGGACAGCCCCTAAGCTCCTAATCTACGC |
| | | | TGCATCCAGTTTGCAAACTGGGGTCCCATCAAGATTC |
| | | | AGTGCCAGTGGATCTGGGGCAGATTTCACTCTCACCA |
| | | | TCAGCAGTCTGCAACCTGAAGATTTTGCGACTTACCA |
| | | | CTGTCAACAAACTTACATTATTCCGTACACTTTTGGCC |
| | | | AGGGGACCAAAGTGGATATCAAA |
| 315 | 5034 | 1338 | DIQMTQSPSSLSASVGDRVTISCRASQTISRYLNWYQVKP |
| | | | GTAPKLLIYAASSLQTGVPSRFSASGSGADFTLTISSLQPE |
| | | | DFATYHCQQTYIIPYTFGQGTKVDIK |
| 315 | 5035 | 1339 | RASQTISRYLN |
| 315 | 5036 | 1340 | CGGGCAAGTCAGACTATAAGCAGATATTTAAAT |
| 315 | 5037 | 1341 | AASSLQT |
| 315 | 5038 | 1342 | GCTGCATCCAGTTTGCAAACT |
| 315 | 5039 | 1343 | QQTYIIPYT |
| 315 | 5040 | 1344 | CAACAAACTTACATTATTCCGTACACT |
| 316 | 5041 | 1345 | GAGGTGCAGCTGGTGGAGTCGGGCCCAGGACTGGTGA |
| | | | AGCCTTCACAGACCCTGTCCCTCACCTGCACTGTCTCT |
| | | | GATGTCCTCATCAGCAGTGGTGATTACTACTGGAGTT |
| | | | GGATCCGCCAGTCCCCAGGGAAGGGCCTGGAGTGGCT |
| | | | TGGGTACATCTATTATACCGGGAAGACCAAATATAAT |
| | | | CCGTCCCTCGAGAGTCGAATTACCATGTCAGTAGACA |
| | | | CGTCCAAGAACCAGTTCTCCCTGAGGTTGAGCTCTGTT |
| | | | ACTGCCGCAGACACGGCCGTATATTTCTGTACCAGAG |
| | | | ATCTGGGATATAGCACCTCGTCCCCCTCCTTTTACTAT |
| | | | GGGATGGACGTCTGGGGCCAAGGGACCACGGTCACC |
| | | | GTCTCCTCA |
| 316 | 5042 | 1346 | EVQLVESGPGLVKPSQTLSLTCTVSDVLISSGDYYWSWI |
| | | | RQSPGKGLEWLGYIYYTGKTKYNPSLESRITMSVDTSKN |
| | | | QFSLRLSSVTAADTAVYFCTRDLGYSTSSPSFYYGMDV |
| | | | WGQGTTVTVSS |
| 316 | 5043 | 1347 | VLISSGDYYWS |
| 316 | 5044 | 1348 | GTCCTCATCAGCAGTGGTGATTACTACTGGAGT |
| 316 | 5045 | 1349 | YIYYTGKTKYNPSLES |
| 316 | 5046 | 1350 | TACATCTATTATACCGGGAAGACCAAATATAATCCGT |
| | | | CCCTCGAGAGT |
| 316 | 5047 | 1351 | TRDLGYSTSSPSFYYGMDV |
| 316 | 5048 | 1352 | ACCAGAGATCTGGGATATAGCACCTCGTCCCCCTCCTT |
| | | | TTACTATGGGATGGACGTC |
| 316 | 5049 | 1353 | GAAATTGTGTTGACACAGTCTCCAGCCACCCTGTCTTT |
| | | | GTCTCCAGGGGAAAGAGCCACCCTCTCCTGCAGGGCC |
| | | | AGTCAGAGTGTTGGGACCTACTTAGCCTGGTACCAAC |
| | | | AGAAACCTGGCCAGGCTCCCAGGCTCCTCATCTATGA |
| | | | TGCATCTTACAGGGTCACTGGCATCCCAGCCAGGTTC |
| | | | AGTGCCAGTGGGTCTGCGACAGACTTCACTCTCACCA |
| | | | TCAGCAGCCTAGAGCCTGAAGATTTTGCAGTTTATTTC |
| | | | TGTCAGCAGCGTACCAACTGGCCGATCACCTTCGGCC |
| | | | AGGGGACACGACTGGAGATTAAA |
| 316 | 5050 | 1354 | EIVLTQSPATLSLSPGERATLSCRASQSVGTYLAWYQQK |
| | | | PGQAPRLLIYDASYRVTGIPARFSASGSATDFTLTISSLEP |
| | | | EDFAVYFCQQRTNWPITFGQGTRLEIK |
| 316 | 5051 | 1355 | RASQSVGTYLA |
| 316 | 5052 | 1356 | AGGGCCAGTCAGAGTGTTGGGACCTACTTAGCC |
| 316 | 5053 | 1357 | DASYRVT |
| 316 | 5054 | 1358 | GATGCATCTTACAGGGTCACT |
| 316 | 5055 | 1359 | QQRTNWPIT |
| 316 | 5056 | 1360 | CAGCAGCGTACCAACTGGCCGATCACC |
| 317 | 5057 | 1361 | CAGGTCCAGCTTGTGCAGTCTGGACCTGAGGTGAAGA |
| | | | AGCCTGGGGCCTCAGTGACGGTCTCCTGCAAGGCTTC |
| | | | CGGTTACACCTTTAGCCATTACGGTATTAGTTGGGTGC |
| | | | GACAGGCCCCTGGACAAGGGCTTGAGTGGATGGGGTG |
| | | | GATCAGCGCGTACCATGGTCAGACAAACTATGCACAG |
| | | | AACTTCCAGGGCAGAGTCACCATGACCACAGACACAT |
| | | | CCTCGAACACAGCCTACATGGAGGTCAGGAGCCTGAG |
| | | | ATCTGACGACACGGCCGTTTATTTCTGTGCGAGAGAT |
| | | | GTCTTTTCGAAAACAGCAGCTCGAATCTTTGACTACTG |
| | | | GGGCCAGGGAACCCTGGTCACCGTCTCCTCA |
| 317 | 5058 | 1362 | QVQLVQSGPEVKKPGASVTVSCKASGYTFSHYGISWVR |
| | | | QAPGQGLEWMGWISAYHGQTNYAQNFQGRVTMTTDTS |
| | | | SNTAYMEVRSLRSDDTAVYFCARDVFSKTAARIFDYWG |
| | | | QGTLVTVSS |
| 317 | 5059 | 1363 | YTFSHYGIS |
| 317 | 5060 | 1364 | TACACCTTTAGCCATTACGGTATTAGT |
| 317 | 5061 | 1365 | WISAYHGQTNYAQNFQG |
| 317 | 5062 | 066 | TGGATCAGCGCGTACCATGGTCAGACAAACTATGCAC |
| | | | AGAACTTCCAGGGC |
| 317 | 5063 | 1367 | ARDVFSKTAARIFDY |
| 317 | 5064 | 1368 | GCGAGAGATGTCTTTTCGAAAACAGCAGCTCGAATCT |
| | | | TTGACTAC |
| 317 | 5065 | 1369 | GAAATTGTATTGACGCAGTCTCCACTCTCCCTGCCCGT |
| | | | CACCCTTGGACAGCCGGCCTCCATCTCCTGCAGGTCTA |
| | | | GTCAAAGCCTCGAATATAGTGACGGAAACACCTACTT |
| | | | GAGTTGGTTTCAGCAGAGGCCAGGCCAATCTCCAAGG |
| | | | CGCCTAATTTATAAGGTTTCTAACCGGGACTCTGGGGT |
| | | | CCCAGACAGATTCAGCGGCAGTCAGTCAGGCACTGAT |
| | | | TTCACACTGAAAATCAGCAGGGTGGAGGCTGAGGATG |
| | | | TTGGGGTTTATTACTGCATGCAAGCTACAGACTGGCC |
| | | | GGTCACGTTCGGCCAAGGGACCAAGCTGGAGATCAAA |
| 317 | 5066 | 1370 | EIVLTQSPLSLPVTLGQPASISCRSSQSLEYSDGNTYLSWF |
| | | | QQRPGQSPRRLIYKVSNRDSGVPDRFSGSQSGTDFTLKIS |
| | | | RVEAEDVGVYYCMQATDWPVTFGQGTKLEIK |
| 317 | 5067 | 1371 | RSSQSLEYSDGNTYLS |
| 317 | 5068 | 1372 | AGGTCTAGTCAAAGCCTCGAATATAGTGACGGAAACA |
| | | | CCTACTTGAGT |
| 317 | 5069 | 1373 | KVSNRDS |
| 317 | 5070 | 1374 | AAGGTTTCTAACCGGGACTCT |
| 317 | 5071 | 1375 | MQATDWPVT |
| 317 | 5072 | 1376 | ATGCAAGCTACAGACTGGCCGGTCACG |
| 318 | 5073 | 1377 | CAGGTGCAGCTGCAGGAGTCGGGCCCAAGACTGGTGA |
| | | | AGCCTTCGCAGACCCTGTCCCTCACCTGCACTGTCTCT |
| | | | GGTGGCTCCATCAGCAGTGGTGATTATTACTGGAGTT |
| | | | GGATCCGCCAGCCCCCAGGGAAGGGCCTGGAGTGGAT |
| | | | TGGGTACATCTATTACAGTGGGAGCACCCACTACAAC |
| | | | CCGTCCCTCAAGAGTCGAGTTAGCATGTCAGTAGACA |
| | | | CGGCCAAGAACCAGTTCTCCCTGAAGCTGACCTCTGT |
| | | | GACTGCCGCAGACACGGCCGTCTATTACTGTGCCAGA |
| | | | GATATCGGCTACGGTGACCACGGGACTGGGTCTTATT |
| | | | ACTACGGAATAGAAGACTGGGGCCAAGGGACCACGG |
| | | | TCACCGTCTCCTCA |
| 318 | 5074 | 1378 | QVQLQESGPRLVKPSQTLSLTCTVSGGSISSGDYYWSWI |
| | | | RQPPGKGLEWIGYIYYSGSTHYNPSLKSRVSMSVDTAKN |
| | | | QFSLKLTSVTAADTAVYYCARDIGYGDHGTGSYYYGIE |
| | | | DWGQGTTVTVSS |
| 318 | 5075 | 1379 | GSISSGDYYWS |
| 318 | 5076 | 1380 | GGCTCCATCAGCAGTGGTGATTATTACTGGAGT |
| 318 | 5077 | 1381 | YIYYSGSTHYNPSLKS |
| 318 | 5078 | 1382 | TACATCTATTACAGTGGGAGCACCCACTACAACCCGT |
| | | | CCCTCAAGAGT |
| 318 | 5079 | 1383 | ARDIGYGDHGTGSYYYGIED |
| 318 | 5080 | 1384 | GCCAGAGATATCGGCTACGGTGACCACGGGACTGGGT |
| | | | CTTATTACTACGGAATAGAAGAC |
| 318 | 5081 | 1385 | GATATTGTGATGACTCAGACTCCAGCCACCCTGTCTTT |
| | | | GTCTCCAGGGGACAGAGCCACCCTCTCCTGCAGGGCC |
| | | | AGTCAGAATATTATGAGCTACTTAGCCTGGTACCAAC |
| | | | ACAAACCTGGCCAGCCTCCCAGGCTCCTCATCTATGA |
| | | | TGCATCCTACAGGGCCGCTGGCATCCCAGCCAGGTTC |
| | | | AGTGGCAGTGGGTCTGGGACAGACTTCACTCTCACCA |
| | | | TCAGCAGCCTAGAGCCTGAAGATTTTGCAGTTTATTAC |
| | | | TGTCAGCAGCGAACCAACTGGATCACCTTCGGCCAAG |
| | | | GGACACGACTGGAGATTAAA |
| 318 | 5082 | 1386 | DIVMTQTPATLSLSPGDRATLSCRASQNIMSYLAWYQH |
| | | | KPGQPPRLLIYDASYRAAGIPARFSGSGSGTDFTLTISSLE |
| | | | PEDFAVYYCQQRTNWITFGQGTRLEIK |
| 318 | 5083 | 1387 | RASQNIMSYLA |
| 318 | 5084 | 1388 | AGGGCCAGTCAGAATATTATGAGCTACTTAGCC |
| 318 | 5085 | 1389 | DASYRAA |
| 318 | 5086 | 1390 | GATGCATCCTACAGGGCCGCT |
| 318 | 5087 | 1391 | QQRTNWIT |
| 318 | 5088 | 1392 | CAGCAGCGAACCAACTGGATCACC |
| 319 | 5089 | 1393 | GAGGTGCAGCTGGTGGAGTCAGGGGGAGGCTTGGTGC |
| | | | AGCGGGGGGGGTCCCTGAGACTCTCGTGTGCGGCCTC |
| | | | TGGATTCACCTTTAGTGGTAATGCCATGAGCTGGGTCC |
| | | | GCCAGGCTCCAGGGAAGGGGCTGGAGTGGGTCGCATC |
| | | | TATTGGTGAAAGTGCTACTAGCGCATACTACGCAGAC |
| | | | TCCGTGAAGGGCCGGTTCACCATCTCCAGAGATGATT |
| | | | CGAAGAACACTCTGTATCTCCAAATGAACAGCCTGAG |
| | | | ACCCGAGGACACGGCCGTATATTTCTGTGCGAAAGAT |
| | | | CGCGTAGGATGGTTCGGGGAGTTCGACGCTTTTGATTT |
| | | | CTGGGGCCAAGGGACAATGGTCACCGTCTCTTCA |
| 319 | 5090 | 1394 | EVQLVESGGGLVQRGGSLRLSCAASGFTFSGNAMSWVR |
| | | | QAPGKGLEWVASIGESATSAYYADSVKGRFTISRDDSKN |
| | | | TLYLQMNSLRPEDTAVYFCAKDRVGWFGEFDAFDFWG |
| | | | QGTMVTVSS |
| 319 | 5091 | 1395 | FTFSGNAMS |
| 319 | 5092 | 1396 | TTCACCTTTAGTGGTAATGCCATGAGC |
| 319 | 5093 | 1397 | SIGESATSAYYADSVKG |
| 319 | 5094 | 1398 | TCTATTGGTGAAAGTGCTACTAGCGCATACTACGCAG |
| | | | ACTCCGTGAAGGGC |
| 319 | 5095 | 1399 | AKDRVGWFGEFDAFDF |
| 319 | 5096 | 1400 | GCGAAAGATCGCGTAGGATGGTTCGGGGAGTTCGACG |
| | | | CTTTTGATTTC |
| 319 | 5097 | 1401 | TCCTATGAGCTGACGCAGCCACCCTCAGTGTCAGTGG |
| | | | CCCCAGGAAAGACGGCCACCATTTCCTGTGGGGGAAA |
| | | | CAACATTGGAGGTCACAAAGTGCACTGGTACCAGCAG |
| | | | AGGCCAGGCCAGGCCCCTGTCTTGGTCATCTATTATG |
| | | | ATAACGTCCGGCCCTCAGGGATCCCTGAGCGATTCTC |
| | | | TGGCTCCAACTCTGGAAACACGGCCACCCTGACCATC |
| | | | AGCAGGGTCGAGGCCGGGGATGAGGCCGACTTTTACT |
| | | | GTCAGGTGTGGGATAGTCGTTCTGAACATGTCATATTC |
| | | | GGCGGGGGGACCAAGGTCACCGTCCTA |
| 319 | 5098 | 1402 | SYELTQPPSVSVAPGKTATISCGGNNIGGHKVHWYQQRP |
| | | | GQAPVLVIYYDNVRPSGIPERFSGSNSGNTATLTISRVEA |
| | | | GDEADFYCQVWDSRSEHVIFGGGTKVTVL |
| 319 | 5099 | 1403 | GGNNIGGHKVH |
| 319 | 5100 | 1404 | GGGGGAAACAACATTGGAGGTCACAAAGTGCAC |
| 319 | 5101 | 1405 | YDNVRPS |
| 319 | 5102 | 1406 | TATGATAACGTCCGGCCCTCA |
| 319 | 5103 | 1407 | QVWDSRSEHVI |
| 319 | 5104 | 1408 | CAGGTGTGGGATAGTCGTTCTGAACATGTCATA |
| 320 | 5105 | 1409 | CAGGTCCAGCTTGTACAGTCTGGAGCTGAGGTGAAGA |
| | | | AGCCTGGGGCCTCAGTGAAGGTCTCGTGCAAGACTTC |
| | | | TGGTTACACCTTTTCCAACTACGGTATCAGCTGGCTGC |
| | | | GACAGGCCCCTGGACAAGGGCTTGAGTGGATGGCATG |
| | | | GATCAGCCCTTATAATGGGAACACAAAGTCTGCACAG |
| | | | AGGTTTCAGGGCAGAGTCATCATGACCACAGACACAT |
| | | | CCACGAGGACAGCCCACATGGAGGTGAAGAGCCTGA |
| | | | GAACTGACGACACGGCCACATATTACTGTGCGAGAGA |
| | | | TCCAGCAGTCGATGCAATACCGATGCTTGACTACTGG |
| | | | GGCCAGGGAACCCTGGTCACCGTCTCCTCA |
| 320 | 5106 | 1410 | QVQLVQSGAEVKKPGASVKVSCKTSGYTFSNYGISWLR |
| | | | QAPGQGLEWMAWISPYNGNTKSAQRFQGRVIMTTDTST |
| | | | RTAHMEVKSLRTDDTATYYCARDPAVDAIPMLDYWGQ |
| | | | GTLVTVSS |
| 320 | 5107 | 1411 | YTFSNYGIS |
| 320 | 5108 | 1412 | TACACCTTTTCCAACTACGGTATCAGC |
| 320 | 5109 | 1413 | WISPYNGNTKSAQRFQG |
| 320 | 5110 | 1414 | TGGATCAGCCCTTATAATGGGAACACAAAGTCTGCAC |
| | | | AGAGGTTTCAGGGC |
| 320 | 5111 | 1415 | ARDPAVDAIPMLDY |
| 320 | 5112 | 1416 | GCGAGAGATCCAGCAGTCGATGCAATACCGATGCTTG |
| | | | ACTAC |
| 320 | 5113 | 1417 | GACATCCAGATGACCCAGTCTCCACTCTCCCTGCCCGT |
| | | | CACCCTTGGACAGCCGGCCTCCATCTCCTGCAGGTCTA |
| | | | GTCAAAGCCTCGTGTACACTGATGGAAACACCTACTT |
| | | | GAGCTGGTTTCAGCAGAGGCCAGGCCAATCTCCAAGG |
| | | | CGCCTAATTTATAGGGTTTCTCACCGGGACTCTGGGGT |
| | | | CCCAGACAGATTCACCGGCAGTGGGTCAGGCACTGAT |
| | | | TTCACACTGATAATCCGCAGGGTGGAGGCTGAGGATG |
| | | | TTGGGGTTTATTACTGCATGCAAGGTACACACTGGCCT |
| | | | CTCACTTTCGGCGGAGGGACCAAGCTGGAGATCAAA |
| 320 | 5114 | 1418 | DIQMTQSPLSLPVTLGQPASISCRSSQSLVYTDGNTYLSW |
| | | | FQQRPGQSPRRLIYRVSHRDSGVPDRFTGSGSGTDFTLIIR |
| | | | RVEAEDVGVYYCMQGTHWPLTFGGGTKLEIK |
| 320 | 5115 | 1419 | RSSQSLVYTDGNTYLS |
| 320 | 5116 | 1420 | AGGTCTAGTCAAAGCCTCGTGTACACTGATGGAAACA |
| | | | CCTACTTGAGC |
| 320 | 5117 | 1421 | RVSHRDS |
| 320 | 5118 | 1422 | AGGGTTTCTCACCGGGACTCT |
| 320 | 5119 | 1423 | MQGTHWPLT |
| 320 | 5120 | 1424 | ATGCAAGGTACACACTGGCCTCTCACT |
| 321 | 5121 | 1425 | CAGGTCCAGCTGGTACAGTCTGGTCCTGCGCTGGTGA |
| | | | AACCCACACAGACCCTCACACTGACCTGCACCTTCGG |
| | | | TGGATTCTCACTCAGCAGACATGGAATGCGTGTGACC |
| | | | TGGATCCGTCAGGCCCCCGGGAAGGCCCTGGAGTGGC |
| | | | TTGGTCACATTGATTGGGATGATGATAAATTCTACAG |
| | | | GACATCTCTGAAGACCAGGCTCACCATCTCCAAGGAC |
| | | | CCCTCTAACAATGAGGTGGTCCTGAAAATGACCAACA |
| | | | TGGACCACGTGGACACAGCCACGTATTACTGTGCACT |
| | | | GATGAGGCCCTTTTGGAGTCGTGACGACTACTACTATT |
| | | | CCATCGCCGTCTGGGGCAAAGGGACCACGGTCACCGT |
| | | | CTCCTCA |
| 321 | 5122 | 1426 | QVQLVQSGPALVKPTQTLTLTCTFGGFSLSRHGMRVTWI |
| | | | RQAPGKALEWLGHIDWDDDKFYRTSLKTRLTISKDPSN |
| | | | NEVVLKMTNMDHVDTATYYCALMRPFWSRDDYYYSIA |
| | | | VWGKGTTVTVSS |
| 321 | 5123 | 1427 | FSLSRHGMRVT |
| 321 | 5124 | 1428 | TTCTCACTCAGCAGACATGGAATGCGTGTGACC |
| 321 | 5125 | 1429 | HIDWDDDKFYRTSLKT |
| 321 | 5126 | 1430 | CACATTGATTGGGATGATGATAAATTCTACAGGACAT |
| | | | CTCTGAAGACC |
| 321 | 5127 | 1431 | ALMRPFWSRDDYYYSIAV |
| 321 | 5128 | 1432 | GCACTGATGAGGCCCTTTTGGAGTCGTGACGACTACT |
| | | | ACTATTCCATCGCCGTC |
| 321 | 5129 | 1433 | GATATTGTGCTGACCCAGTCTCCAGGCACCCTGTCTTT |
| | | | GTCTCCAGGGGACAGAGCCACCCTCTCCTGCAGGGCC |
| | | | AGTCAGAGTGTCGGCAGCGGCTACGTAACCTGGTACC |
| | | | AGCAGAAACCTGGCCAGGCTCCCAGGCTCCTCATTTA |
| | | | TGGTGCATCAAACAGGGCCGAAGGCATCCCAGACAG |
| | | | GTTCAGTGGCAGTGGGTCTGGGACAGACTTCACTCTC |
| | | | ACCATCAGCGGACTGGAGTCTGAAGATTTTGTAATTT |
| | | | ATTACTGTCAGCTATATCATAGGTCACCTGGCTCTGCG |
| | | | AGTCAAACCGTTTGGACGTTCGGCCAAGGGACCAAGG |
| | | | TGGAAATCAAA |
| 321 | 5130 | 1434 | DIVLTQSPGTLSLSPGDRATLSCRASQSVGSGYVTWYQQ |
| | | | KPGQAPRLLIYGASNRAEGIPDRFSGSGSGTDFTLTISGLE |
| | | | SEDFVIYYCQLYHRSPGSASQTVWTFGQGTKVEIK |
| 321 | 5131 | 1435 | RASQSVGSGYVT |
| 321 | 5132 | 1436 | AGGGCCAGTCAGAGTGTCGGCAGCGGCTACGTAACC |
| 321 | 5133 | 1437 | GASNRAE |
| 321 | 5134 | 1438 | GGTGCATCAAACAGGGCCGAA |
| 321 | 5135 | 1439 | QLYHRSPGSASQTVWT |
| 321 | 5136 | 1440 | CAGCTATATCATAGGTCACCTGGCTCTGCGAGTCAAA |
| | | | CCGTTTGGACG |
| 322 | 5137 | 1441 | CAGGTCCAGCTTGTACAGTCTGGACCTGAGGTGAAGA |
| | | | AGCCTGGGGCCTCAGTGAGGGTCTCCTGCGAGGCTTC |
| | | | TGGTTACCCCTTTAGCAATTACGGCATCACCTGGGTGC |
| | | | GCCAGGCCCCTGGACAAGGGCTTGAGTGGATGGGATG |
| | | | GATCAGCGCTTACAACGGAAACAGAGACTATCTGCAG |
| | | | AAGTTTCAGGGCAGACTCACCATGACCATAGACACAT |
| | | | CCACGAGAACAGCCCACATGGAATTGAGGCGCCTGAC |
| | | | ATCTGACGACACGGCCGTATATTGGTGTGCGAGAGAC |
| | | | ACACCCGCCACTGCTGCCCCTCTGCTTGACTACTGGGG |
| | | | CCAGGGAACCCTGGTCACCGTCTCCTCA |
| 322 | 5138 | 1442 | QVQLVQSGPEVKKPGASVRVSCEASGYPFSNYGITWVR |
| | | | QAPGQGLEWMGWISAYNGNRDYLQKFQGRLTMTIDTS |
| | | | TRTAHMELRRLTSDDTAVYWCARDTPATAAPLLDYWG |
| | | | QGTLVTVSS |
| 322 | 5139 | 1443 | YPFSNYGIT |
| 322 | 5140 | 1444 | TACCCCTTTAGCAATTACGGCATCACC |
| 322 | 5141 | 1445 | WISAYNGNRDYLQKFQG |
| 322 | 5142 | 1446 | TGGATCAGCGCTTACAACGGAAACAGAGACTATCTGC |
| | | | AGAAGTTTCAGGGC |
| 322 | 5143 | 1447 | ARDTPATAAPLLDY |
| 322 | 5144 | 1448 | GCGAGAGACACACCCGCCACTGCTGCCCCTCTGCTTG |
| | | | ACTAC |
| 322 | 5145 | 1449 | GATATTGTGATGACTCAGTCTCCACTCTCCCTGGCCGT |
| | | | CACCCTTGGACAGCCGGCCTCCATCTCCTGCAGGTCTA |
| | | | GTCAAAGCCTCGAATTCACTGATGGAAACACCTACTT |
| | | | GAATTGGTTTCAGCAGAGGCCAGGCCAATCTCCAAGG |
| | | | CGCCTAATTTATAAGGTTTCTAACCGGGACTCTGGGGT |
| | | | CCCAGACAGATTCAGCGGCAGTGGGTCAGGCACTGGT |
| | | | TTCACACTGAAAATCAGCAGGGTGGAGGCTGAGGATG |
| | | | TTGGGGTTTATTACTGCATGCAAGGTATTTTCCGGCCG |
| | | | GGGACGTTCGGCCAAGGGACCAAGGTGGAAATCAAA |
| 322 | 5146 | 1450 | DIVMTQSPLSLAVTLGQPASISCRSSQSLEFTDGNTYLNW |
| | | | FQQRPGQSPRRLIYKVSNRDSGVPDRFSGSGSGTGFTLKI |
| | | | SRVEAEDVGVYYCMQGIFRPGTFGQGTKVEIK |
| 322 | 5147 | 1451 | RSSQSLEFTDGNTYLN |
| 322 | 5148 | 1452 | AGGTCTAGTCAAAGCCTCGAATTCACTGATGGAAACA |
| | | | CCTACTTGAAT |
| 322 | 5149 | 1453 | KVSNRDS |
| 322 | 5150 | 1454 | AAGGTTTCTAACCGGGACTCT |
| 322 | 5151 | 1455 | MQGIFRPGT |
| 322 | 5152 | 1456 | ATGCAAGGTATTTTCCGGCCGGGGACG |
| 323 | 5153 | 1457 | CAGGTCCAGCTGGTGCAGTCTGGAGCTGAGGTGAAGA |
| | | | AGCCTGGGGCCTCAGTGAAGGTCTCCTGCAAGGCTTC |
| | | | TGGTTACACCTTTGTCCACTATGGTATCAGTTGGGTGC |
| | | | GACAGGCCCCTGGACAAGGGCTTGAGTGGATGGGATG |
| | | | GATCAGCGCATACAATGGTAATACAAACTCTGCACTG |
| | | | AAGTTCCAGGACAGAGTCACCATGACCACAGACCCAT |
| | | | CCACGAGCACAGCCTACATGGAGCTGAGGAGCCTGAG |
| | | | ATCTGACGACACGGCCATTTATTACTGTGCGAGAGAC |
| | | | TCAGGTTGTTGTAGTGGTTCCACCTCAGACGTCTGGGG |
| | | | CAAAGGGACCACGGTCACCGTCTCCTCA |
| 323 | 5154 | 1458 | QVQLVQSGAEVKKPGASVKVSCKASGYTFVHYGISWVR |
| | | | QAPGQGLEWMGWISAYNGNTNSALKFQDRVTMTTDPS |
| | | | TSTAYMELRSLRSDDTAIYYCARDSGCCSGSTSDVWGK |
| | | | GTTVTVSS |
| 323 | 5155 | 1459 | YTFVHYGIS |
| 323 | 5156 | 1460 | TACACCTTTGTCCACTATGGTATCAGT |
| 323 | 5157 | 1461 | WISAYNGNTNSALKFQD |
| 323 | 5158 | 1462 | TGGATCAGCGCATACAATGGTAATACAAACTCTGCAC |
| | | | TGAAGTTCCAGGAC |
| 323 | 5159 | 1463 | ARDSGCCSGSTSDV |
| 323 | 5160 | 1464 | GCGAGAGACTCAGGTTGTTGTAGTGGTTCCACCTCAG |
| | | | ACGTC |
| 323 | 5161 | 1465 | GATATTGTGATGACTCAGTCTCCACTCTCTTCACCTGT |
| | | | CACCCTTGGACAGCCGGCCTCCATCTCCTGCAGGTCTA |
| | | | GTCAAAGCCTCGTGCACAGTGATGGAAACACCTACTT |
| | | | GAGTTGGCTTCACCAGAGGCCAGGCCAGCCTCCAAGA |
| | | | CTCCTAATTTATAAGATTTCCCACCGGTTCTCTGGGGT |
| | | | CCCAGACAGATTCACTGGCAGTGGGGCAGGGACAGAT |
| | | | TTCACACTGAAAATCAGCAGGGTGGAGGCTGAGGATG |
| | | | TCGGGGTTTATTACTGCATGCAAGCTACAGAATTTCCT |
| | | | CCGATGTACACTTTTGGCCAGGGGACCAAGGTGGAGA |
| | | | TCAAA |
| 323 | 5162 | 1466 | DIVMTQSPLSSPVTLGQPASISCRSSQSLVHSDGNTYLSW |
| | | | LHQRPGQPPRLLIYKISHRFSGVPDRFTGSGAGTDFTLKIS |
| | | | RVEAEDVGVYYCMQATEFPPMYTFGQGTKVEIK |
| 323 | 5163 | 1467 | RSSQSLVHSDGNTYLS |
| 323 | 5164 | 1468 | AGGTCTAGTCAAAGCCTCGTGCACAGTGATGGAAACA |
| | | | CCTACTTGAGT |
| 323 | 5165 | 1469 | KISHRFS |
| 323 | 5166 | 1470 | AAGATTTCCCACCGGTTCTCT |
| 323 | 5167 | 1471 | MQATEFPPMYT |
| 323 | 5168 | 1472 | ATGCAAGCTACAGAATTTCCTCCGATGTACACT |
| 324 | 5169 | 1473 | GAGGTGCAGCTGGTGGAGACGGGCCCAGGACTGGTG |
| | | | AAGCCTTCGGAGACCCTGTCCCTCACCTGCACTGTCTC |
| | | | TGGTGACTCCATCAGTGGTTACTACTGGAGCTGGATC |
| | | | CGGCAGTCCCCAGGGAAGGGACTGGAGTGGATTGGCT |
| | | | ATATCTATTACAGGGGGAGCACCGACTACAACCCCTC |
| | | | CCTCAAGAGTCGAGTCACCATATCAGTAGACACGTCC |
| | | | AAGAACCAGTTCTCCCTGAAACTGAGCTCTGTGACCG |
| | | | CTGCGGACACGGCCGTGTATTACTGTGCGAGAGATAA |
| | | | TAAACACCATGATTCGGGAAATTATTACGCATACTTT |
| | | | GACCATTGGGGCCAGGGAACCCTGGTCACCGTCTCCT |
| | | | CA |
| 324 | 5170 | 1474 | EVQLVETGPGLVKPSETLSLTCTVSGDSISGYYWSWIRQ |
| | | | SPGKGLEWIGYIYYRGSTDYNPSLKSRVTISVDTSKNQFS |
| | | | LKLSSVTAADTAVYYCARDNKHHDSGNYYAYFDHWG |
| | | | QGTLVTVSS |
| 324 | 5171 | 1475 | DSISGYYWS |
| 324 | 5172 | 1476 | GACTCCATCAGTGGTTACTACTGGAGC |
| 324 | 5173 | 1477 | YIYYRGSTDYNPSLKS |
| 324 | 5174 | 1478 | TATATCTATTACAGGGGGAGCACCGACTACAACCCCT |
| | | | CCCTCAAGAGT |
| 324 | 5175 | 1479 | ARDNKHHDSGNYYAYFDH |
| 324 | 5176 | 1480 | GCGAGAGATAATAAACACCATGATTCGGGAAATTATT |
| | | | ACGCATACTTTGACCAT |
| 324 | 5177 | 1481 | GATATTGTGATGACTCAGTCTCCATCCTCCCTGTCTGC |
| | | | ATCTGTAGGAGACAGAGTCACCATCACTTGCCGGGCA |
| | | | AGTCAGAACATTAACACCTTTTTAAATTGGTATCAGC |
| | | | ACAAACCAGGGAAAGCCCCTAAACTCCTGATCTATGG |
| | | | TGCATCCCGTTTGCAGAGTGGGGTCCCATCAAGGTTC |
| | | | ACTGGCAGTGGATCTGGGACAGATTTCACTCTCACCA |
| | | | TCAGCAGTCTGCAACCTGAAGATTTTGCAACTTACTCC |
| | | | TGTCAACAGAGTTACACTACCCGGCTCACTTTCGGCG |
| | | | GAGGGACCAAGGTGGAAATCAAA |
| 324 | 5178 | 1482 | DIVMTQSPSSLSASVGDRVTITCRASQNINTFLNWYQHK |
| | | | PGKAPKLLIYGASRLQSGVPSRFTGSGSGTDFTLTISSLQP |
| | | | EDFATYSCQQSYTTRLTFGGGTKVEIK |
| 324 | 5179 | 1483 | RASQNINTFLN |
| 324 | 5180 | 1484 | CGGGCAAGTCAGAACATTAACACCTTTTTAAAT |
| 324 | 5181 | 1485 | GASRLQS |
| 324 | 5182 | 1486 | GGTGCATCCCGTTTGCAGAGT |
| 324 | 5183 | 1487 | QQSYTTRLT |
| 324 | 5184 | 1488 | CAACAGAGTTACACTACCCGGCTCACT |
| 325 | 5185 | 1489 | CAGGTCCAGCTGGTGCAGTCTGGGACTGAGGTGAAGA |
| | | | AGCCTGGGGCCTCAGTGAAGATTTCCTGCAAGACTTC |
| | | | TGGATACACCTTCACTAATAATGTAATTCAATGGGTG |
| | | | CGCCAGGCCCCCGGACAAAGGCTTGAGTGGATGGGAT |
| | | | GGATCAGCGCTGGCAATGGTTACACAAAATATTCAGA |
| | | | CAAGTTCCAGGACAGAGTCACCATTACCAGGGACACA |
| | | | TCCGCGAGCACAGCCTACATGGAGGTGAGCAGCCTGA |
| | | | CATCTGAAGACACGGCTATGTATTACTGTGCGAGACA |
| | | | AGTCTCGACTAGTGGCTGGCACGCAACGTCACACCGG |
| | | | TTCGCCCCCTGGGGCCAGGGAACCCTGGTCACCGTCT |
| | | | CCTCA |
| 325 | 5186 | 1490 | QVQLVQSGTEVKKPGASVKISCKTSGYTFTNNVIQWVR |
| | | | QAPGQRLEWMGWISAGNGYTKYSDKFQDRVTITRDTSA |
| | | | STAYMEVSSLTSEDTAMYYCARQVSTSGWHATSHRFAP |
| | | | WGQGTLVTVSS |
| 325 | 5187 | 1491 | YTFTNNVIQ |
| 325 | 5188 | 1492 | TACACCTTCACTAATAATGTAATTCAA |
| 325 | 5189 | 1493 | WISAGNGYTKYSDKFQD |
| 325 | 5190 | 1494 | TGGATCAGCGCTGGCAATGGTTACACAAAATATTCAG |
| | | | ACAAGTTCCAGGAC |
| 325 | 5191 | 1495 | ARQVSTSGWHATSHRFAP |
| 325 | 5192 | 1496 | GCGAGACAAGTCTCGACTAGTGGCTGGCACGCAACGT |
| | | | CACACCGGTTCGCCCCC |
| 325 | 5193 | 1497 | GACATCCAGATGACCCAGTCTCCATCCTCCCTGTCTGC |
| | | | ATCTGTAGGAGACAGAGTCACCATCACTTGCCAGGCG |
| | | | AGTCAGGGCATTAGTAGATATTTAAATTGGTATCAGC |
| | | | AGAAACCAGGGAAAGCCCCTAACCTCCTGATCTACGA |
| | | | TGCATCCAATTTGGAAACAGGGGTCCCATCAAGGTTC |
| | | | AGTGGAAGTGGATCTGGGACACATTTTACTTTAACCA |
| | | | TCAGCAGCCTGCAGCCTGAAGATATTGCAACATATTA |
| | | | CTGTCAACAGTATGATAATCTCCCGCTCACTTTCGGCG |
| | | | GAGGGACCAAGGTGGAAATCAAA |
| 325 | 5194 | 1498 | DIQMTQSPSSLSASVGDRVTITCQASQGISRYLNWYQQK |
| | | | PGKAPNLLIYDASNLETGVPSRFSGSGSGTHFTLTISSLQP |
| | | | EDIATYYCQQYDNLPLTFGGGTKVEIK |
| 325 | 5195 | 1499 | QASQGISRYLN |
| 325 | 5196 | 1500 | CAGGCGAGTCAGGGCATTAGTAGATATTTAAAT |
| 325 | 5197 | 1501 | DASNLET |
| 325 | 5198 | 1502 | GATGCATCCAATTTGGAAACA |
| 325 | 5199 | 1503 | QQYDNLPLT |
| 325 | 5200 | 1504 | CAACAGTATGATAATCTCCCGCTCACT |
| 326 | 5201 | 1505 | GAGGTGCAGCTGGTGGAGTCTGGGGGAGGCGTGGTCC |
| | | | AGCCTGGGAGGTCCCTGAGACTCTCCTGTGAAGCCTC |
| | | | TGGATTCACCTTCAGTAGTTTTAGCATGCACTGGGTCC |
| | | | GCCAGGCTCCGGGCAAGGGGCTGGAGTGGGTGGCAG |
| | | | TGATTTTATATGATGGGAGTAATCAATACTATGCAGA |
| | | | CTCCGTGAAGGGCCGATTCACCATCTCCAGAGACAAT |
| | | | TCCAAGAACACGCTTTATCTGCAAATGAACACCCTGA |
| | | | GAGCTGAGGACACGGCTATGTATTACTGTGCGAAATC |
| | | | ATCATCGTCCCATGTTAACTCTCGACAAGACAAATGG |
| | | | GGCCAGGGCACCCTGGTCACCGTCTCCTCA |
| 326 | 5202 | 1506 | EVQLVESGGGVVQPGRSLRLSCEASGFTFSSFSMHWVR |
| | | | QAPGKGLEWVAVILYDGSNQYYADSVKGRFTISRDNSK |
| | | | NTLYLQMNTLRAEDTAMYYCAKSSSSHVNSRQDKWGQ |
| | | | GTLVTVSS |
| 326 | 5203 | 1507 | FTFSSFSMH |
| 326 | 5204 | 1508 | TTCACCTTCAGTAGTTTTAGCATGCAC |
| 326 | 5205 | 1509 | VILYDGSNQYYADSVKG |
| 326 | 5206 | 1510 | GTGATTTTATATGATGGGAGTAATCAATACTATGCAG |
| | | | ACTCCGTGAAGGGC |
| 326 | 5207 | 1511 | AKSSSSHVNSRQDK |
| 326 | 5208 | 1512 | GCGAAATCATCATCGTCCCATGTTAACTCTCGACAAG |
| | | | ACAAA |
| 326 | 5209 | 1513 | GAAATTGTATTGACACAGTCTCCTTCCACCCTGTCTGC |
| | | | ATCTGTAGGAGACAGAGTCACCATCACTTGCCGGGCC |
| | | | AGTCAGAGTATTAGTAGGTGGTTGGCCTGGTATCAGC |
| | | | AGAAACCAGGGGAAGCCCCTAAACTCCTGATCCACAC |
| | | | GGCGTCTACATTAGAAAGTGGGGTCCCATCAAGGTTC |
| | | | AGCGGCAGTGGCTCTGGGACAGAATTCACTCTCACCA |
| | | | TCAACAGCCTGCAGCCTGATGATCTTGCAACTTATTAC |
| | | | TGCCAACAGTATTATAATTGGTGGACGTTCGGCCAAG |
| | | | GGACCAAGGTGGAGATCAAA |
| 326 | 5210 | 1514 | EIVLTQSPSTLSASVGDRVTITCRASQSISRWLAWYQQKP |
| | | | GEAPKLLIHTASTLESGVPSRFSGSGSGTEFTLTINSLQPD |
| | | | DLATYYCQQYYNWWTFGQGTKVEIK |
| 326 | 5211 | 1515 | RASQSISRWLA |
| 326 | 5212 | 1516 | CGGGCCAGTCAGAGTATTAGTAGGTGGTTGGCC |
| 326 | 5213 | 1517 | TASTLES |
| 326 | 5214 | 1518 | ACGGCGTCTACATTAGAAAGT |
| 326 | 5215 | 1519 | QQYYNWWT |
| 326 | 5216 | 1520 | CAACAGTATTATAATTGGTGGACG |
| 327 | 5217 | 1521 | GAGGTGCAGCTGTTGGAGTCCGGAGCTGAGGTGAAGA |
| | | | AGCCTGGGGCCTCAGTGAAGATCTCCTGCAAGGCCTC |
| | | | TGGTTACATCTTTACCAGTTATGGTGTCAGTTGGGTGC |
| | | | GACAGGCCCCTGGACAAGGGCTTAAGTGGATGGGATG |
| | | | GATCAGCGGTTACAATGGTAACACATACTATGACCAG |
| | | | AAATTCCAGGGCAGAGTCACCATGACCACAGACACAT |
| | | | CCACGAACACAGCCTACATGGAGTTGAGGAGCCTGAC |
| | | | ATCTGACGACACGGCCGTATATTACTGTGCGAGAGAT |
| | | | TCCTTTTCAGAGACTGGGACTGGATTTCCTGACTTCTG |
| | | | GGGCCAGGGCACCCTGGTCACCGTCTCTTCA |
| 327 | 5218 | 1522 | EVQLLESGAEVKKPGASVKISCKASGYIFTSYGVSWVRQ |
| | | | APGQGLKWMGWISGYNGNTYYDQKFQGRVTMTTDTST |
| | | | NTAYMELRSLTSDDTAVYYCARDSFSETGTGFPDFWGQ |
| | | | GTLVTVSS |
| 327 | 5219 | 1523 | YIFTSYGVS |
| 327 | 5220 | 1524 | TACATCTTTACCAGTTATGGTGTCAGT |
| 327 | 5221 | 1525 | WISGYNGNTYYDQKFQG |
| 327 | 5222 | 1526 | TGGATCAGCGGTTACAATGGTAACACATACTATGACC |
| | | | AGAAATTCCAGGGC |
| 327 | 5223 | 1527 | ARDSFSETGTGFPDF |
| 327 | 5224 | 1528 | GCGAGAGATTCCTTTTCAGAGACTGGGACTGGATTTC |
| | | | CTGACTTC |
| 327 | 5225 | 1529 | GAAATTGTGTTGACGCAGTCTCCACTCTCCCTGCCCGT |
| | | | CACCCTTGGACAGCCGGCCTCCATCTCCTGCAGGTCTA |
| | | | GTCAAAGCCTCGAATACAGTGATGGAAACACCTACTT |
| | | | GAATTGGTTTCAGCAGAGGCCAGGCCAATCTCCAAGG |
| | | | CGCCTAATTTATAAGGTTTCTAACCGGGACTCTGGGGT |
| | | | CCCCGACAGATTCAGCGGCAGTGGGTCAGGCACTGAT |
| | | | TTCACACTGAAAATCAGCAGGGTGGAGGCTGAGGATG |
| | | | TTGGAGTTTATTACTGCATGCAAGCCACACACCGGCC |
| | | | TCGCACGTTCGGCCAAGGGACCAAAGTGGATATCAAA |
| 327 | 5226 | 1530 | EIVLTQSPLSLPVTLGQPASISCRSSQSLEYSDGNTYLNW |
| | | | FQQRPGQSPRRLIYKVSNRDSGVPDRFSGSGSGTDFTLKI |
| | | | SRVEAEDVGVYYCMQATHRPRTFGQGTKVDIK |
| 327 | 5227 | 1531 | RSSQSLEYSDGNTYLN |
| 327 | 5228 | 1532 | AGGTCTAGTCAAAGCCTCGAATACAGTGATGGAAACA |
| | | | CCTACTTGAAT |
| 327 | 5229 | 1533 | KVSNRDS |
| 327 | 5230 | 1534 | AAGGTTTCTAACCGGGACTCT |
| 327 | 5231 | 1535 | MQATHRPRT |
| 327 | 5232 | 1536 | ATGCAAGCCACACACCGGCCTCGCACG |
| 328 | 5233 | 1537 | CAGGTCCAGCTGGTGCAGTCTGGAGCAGAGGTGAAAA |
| | | | AGCCCGGGGAGTCTCTGAAGATCTCCTGTAAGGGTTT |
| | | | TGGATACAGCTTTAACAGTTACTGGATCGCCTGGGTG |
| | | | CGCCAGATGCCCGGGAAAGGCCTGGAGTGCATGGGC |
| | | | ATCATCTATCCTGGCGACTCTGATACCAGATACAGCC |
| | | | CGTCCTTCCAAGGGCAGGTCACCATCTCAGTCGACAA |
| | | | GTCCATCACTACCGCCTACCTGCAGTGGAGCAGCCTG |
| | | | AAGGTCTCGGACACCGCCATGTATTACTGTGCGAAAA |
| | | | GTAATGTGGGGAATACAGGTTGGAACTACTGGGGCCA |
| | | | GGGAACCCTGGTCACCGTCTCCTCA |
| 328 | 5234 | 1538 | QVQLVQSGAEVKKPGESLKISCKGFGYSFNSYWIAWVR |
| | | | QMPGKGLECMGIIYPGDSDTRYSPSFQGQVTISVDKSITT |
| | | | AYLQWSSLKVSDTAMYYCAKSNVGNTGWNYWGQGTL |
| | | | VTVSS |
| 328 | 5235 | 1539 | YSFNSYWIA |
| 328 | 5236 | 1540 | TACAGCTTTAACAGTTACTGGATCGCC |
| 328 | 5237 | 1541 | IIYPGDSDTRYSPSFQG |
| 328 | 5238 | 1542 | ATCATCTATCCTGGCGACTCTGATACCAGATACAGCC |
| | | | CGTCCTTCCAAGGG |
| 328 | 5239 | 1543 | AKSNVGNTGWNY |
| 328 | 5240 | 1544 | GCGAAAAGTAATGTGGGGAATACAGGTTGGAACTAC |
| 328 | 5241 | 1545 | GAAATTGTATTGACACAGTCTCCAGCCACCCTGTCTTT |
| | | | GTCTCCAGGGGAAAGAGCCACCCTCTCCTGCAGGGCC |
| | | | AGTCACAGTGTTGCCACCGACCTAGCCTGGTACCAGC |
| | | | AGAAACCTGGCCAGGCTCCCAGGCTCCTCATCTATGA |
| | | | TGCATCCAAGAGGGCCACTGACGTCCCAGCCAGGTTC |
| | | | AGTGGCAGTGGGTCTGGGACAGACTTCACTCTCACCA |
| | | | TCAGCAGCCTAGAGCCTGAAGATGTTGCAGTTTATTA |
| | | | CTGTCAGGAAGTTAGGAACTGGCCTCCGTGCACTTTT |
| | | | GGCCAGGGGACCAAAGTGGATATCAAA |
| 328 | 5242 | 1546 | EIVLTQSPATLSLSPGERATLSCRASHSVATDLAWYQQK |
| | | | PGQAPRLLIYDASKRATDVPARFSGSGSGTDFTLTISSLEP |
| | | | EDVAVYYCQEVRNWPPCTFGQGTKVDIK |
| 328 | 5243 | 1547 | RASHSVATDLA |
| 328 | 5244 | 1548 | AGGGCCAGTCACAGTGTTGCCACCGACCTAGCC |
| 328 | 5245 | 1549 | DASKRAT |
| 328 | 5246 | 1550 | GATGCATCCAAGAGGGCCACT |
| 328 | 5247 | 1551 | QEVRNWPPCT |
| 328 | 5248 | 1552 | CAGGAAGTTAGGAACTGGCCTCCGTGCACT |
| 329 | 5249 | 1553 | GAGGTGCAGCTGCAGGAGTCCGGCTCTCGACTGGTGA |
| | | | AGCCTTCACAGACCCTGTCCCTCACCTGCTCTGTCTCT |
| | | | GGTGGCTCCCTCAACGCAGGCGGTTACCTGTGGAGCT |
| | | | GGATCCGTCAGCCACCAGGGAAGGGCCTGGAGTGGGT |
| | | | TGGGTACATCTATCCTAGTGGGACTACCTACTACAAC |
| | | | CCGTCCCTGCAGAGTCGAATCAGCATTTCACAAGACA |
| | | | GGTCCAGGAACCAGTTCTCCCTGAGCGTAGCGTCTGT |
| | | | GACCGCCGCGGACACGGCCGTCTATTACTGTGCCAGA |
| | | | TGTGGGAATGAGTACGGTGAGGTCCATCCTTTTGATA |
| | | | TTTGGGGCCAAGGGACCACGGTCACCGTCTCCTCA |
| 329 | 5250 | 1554 | EVQLQESGSRLVKPSQTLSLTCSVSGGSLNAGGYLWSWI |
| | | | RQPPGKGLEWVGYIYPSGTTYYNPSLQSRISISQDRSRNQ |
| | | | FSLSVASVTAADTAVYYCARCGNEYGEVHPFDIWGQGT |
| | | | TVTVSS |
| 329 | 5251 | 1555 | GSLNAGGYLWS |
| 329 | 5252 | 1556 | GGCTCCCTCAACGCAGGCGGTTACCTGTGGAGC |
| 329 | 5253 | 1557 | YIYPSGTTYYNPSLQS |
| 329 | 5254 | 1558 | TACATCTATCCTAGTGGGACTACCTACTACAACCCGTC |
| | | | CCTGCAGAGT |
| 329 | 5255 | 1559 | ARCGNEYGEVHPFDI |
| 329 | 5256 | 1560 | GCCAGATGTGGGAATGAGTACGGTGAGGTCCATCCTT |
| | | | TTGATATT |
| 329 | 5257 | 1561 | GAAATTGTATTGACACAGTCTCCAGGCACCCTGTCTTT |
| | | | GTCTCCAGGGGAAAGAGCCACCCTCTCCTGCCGGGGC |
| | | | AGTCCTATTGTTGGCAACAACTACTTAGCCTGGTACCA |
| | | | GCAGAAGCCTGGCCAGGCTCCCAGGCTCCTCATCTAT |
| | | | GCTGCATCCATCAGGGCCACTGGCATCCCAGACAGGT |
| | | | TCAGTGGCAGTGGGTCTGGGACAGACTTCACTCTCAC |
| | | | CATCAGCAGACTAGAGCCTGAAGATTTTGCAGTCTAT |
| | | | TACTGTCAGCAATATGGCAGCTCACCGTGGACGTTCG |
| | | | GCCAAGGGACCAAAGTGGATATCAAA |
| 329 | 5258 | 1562 | EIVLTQSPGTLSLSPGERATLSCRGSPIVGNNYLAWYQQ |
| | | | KPGQAPRLLIYAASIRATGIPDRFSGSGSGTDFTLTISRLE |
| | | | PEDFAVYYCQQYGSSPWTFGQGTKVDIK |
| 329 | 5259 | 1563 | RGSPIVGNNYLA |
| 329 | 5260 | 1564 | CGGGGCAGTCCTATTGTTGGCAACAACTACTTAGCC |
| 329 | 5261 | 1565 | AASIRAT |
| 329 | 5262 | 1566 | GCTGCATCCATCAGGGCCACT |
| 329 | 5263 | 1567 | QQYGSSPWT |
| 329 | 5264 | 1568 | CAGCAATATGGCAGCTCACCGTGGACG |
| 330 | 5265 | 1569 | CAGGTGCAGCTGGTGCAGTCTGGAGCTGAGGTGAAGA |
| | | | AGCCTGGGGCCTCAGTGAAGGTCTCCTGCAAGGCTTC |
| | | | TGGTTACATCTTTACCAGTTATGGTGTCAGCTGGGTGC |
| | | | GACAGGCCCCTGGACAAGGGCTTAAGTGGATGGGATG |
| | | | GATCAGCGGTTACAATGGTAACACAAACTATGACCAG |
| | | | AAACTCCAGGGCAGAGTCACCATGACCACAGACACAT |
| | | | CCACGAGCACAGCCTACATGGAGCTGAGGAGCCTGAC |
| | | | ATCTGACGACACGGCCGTTTATTACTGTGCGAGAGAT |
| | | | TCATTTTCAGAGACTGGGACTGGGTTTCCTGACTTCTG |
| | | | GGGCCAGGGAACCCTGGTCACCGTCTCCTCA |
| 330 | 5266 | 1570 | QVQLVQSGAEVKKPGASVKVSCKASGYIFTSYGVSWVR |
| | | | QAPGQGLKWMGWISGYNGNTNYDQKLQGRVTMTTDT |
| | | | STSTAYMELRSLTSDDTAVYYCARDSFSETGTGFPDFWG |
| | | | QGTLVTVSS |
| 330 | 5267 | 1571 | YIFTSYGVS |
| 330 | 5268 | 1572 | TACATCTTTACCAGTTATGGTGTCAGC |
| 330 | 5269 | 1573 | WISGYNGNTNYDQKLQG |
| 330 | 5270 | 1574 | TGGATCAGCGGTTACAATGGTAACACAAACTATGACC |
| | | | AGAAACTCCAGGGC |
| 330 | 5271 | 1575 | ARDSFSETGTGFPDF |
| 330 | 5272 | 1576 | GCGAGAGATTCATTTTCAGAGACTGGGACTGGGTTTC |
| | | | CTGACTTC |
| 330 | 5273 | 1577 | GACATCCAGATGACCCAGTCTCCACTCTCCCTGCCCGT |
| | | | CACCCTTGGACAGCCGGCCTCCATCTCCTGCAGGTCTA |
| | | | GTCAAAGCCTCGAATACAGTGATGGAAACACCTACTT |
| | | | GAATTGGTTTCAGCAGAGGCCAGGCCAATCTCCAAGG |
| | | | CGCCTAATTTATAAGGTTTCTAACCGGGACTCTGGGGT |
| | | | CCCAGACAGATTCAGCGGCAGTGGGTCAGGCACTGAT |
| | | | TTCACACTGAAAATCAGCAGGGTGGAGGCTGAGGATG |
| | | | TTGGAGTTTATTACTGCATGCAAGCCACACACCGGCC |
| | | | TCGCACGTTCGGCCAAGGGACCAAGCTGGAGATCAAA |
| 330 | 5274 | 1578 | DIQMTQSPLSLPVTLGQPASISCRSSQSLEYSDGNTYLNW |
| | | | FQQRPGQSPRRLIYKVSNRDSGVPDRFSGSGSGTDFTLKI |
| | | | SRVEAEDVGVYYCMQATHRPRTFGQGTKLEIK |
| 330 | 5275 | 1579 | RSSQSLEYSDGNTYLN |
| 330 | 5276 | 1580 | AGGTCTAGTCAAAGCCTCGAATACAGTGATGGAAACA |
| | | | CCTACTTGAAT |
| 330 | 5277 | 1581 | KVSNRDS |
| 330 | 5278 | 1582 | AAGGTTTCTAACCGGGACTCT |
| 330 | 5279 | 1583 | MQATHRPRT |
| 330 | 5280 | 1584 | ATGCAAGCCACACACCGGCCTCGCACG |
| 331 | 5281 | 1585 | GAGGTGCAGCTGGTGGAGTCTGGGGGAGGCGTGGTCC |
| | | | AGCCTGGGAGGTCCCTGAGACTCTCCTGTGCAGCGTC |
| | | | TGGATTCACCTTCAGTAGTTTTTCTATGCACTGGGTCC |
| | | | GCCAGGCTCCAGGCAAGGGGCTGGAGTGGGTGGCACT |
| | | | TATATCATCTGACGAGAGGAATTCATACTACGCAGAC |
| | | | TCCGTGAAGGGCCGATTCACCATCTCCAGAGACAATT |
| | | | CCAAGAACACGCTGTATCTGCAAATAAGCAGGCTGAA |
| | | | AGTCGAGGACACGGCTGTGTATTATTGTGCGAGAGAG |
| | | | GCATACGAAGAGTGGGAGCTAACGATGGGGAACCTT |
| | | | GACCACTGGGGCCAGGGAACCCTGGTCACCGTCTCCT |
| | | | CA |
| 331 | 5282 | 1586 | EVQLVESGGGVVQPGRSLRLSCAASGFTFSSFSMHWVR |
| | | | QAPGKGLEWVALISSDERNSYYADSVKGRFTISRDNSKN |
| | | | TLYLQISRLKVEDTAVYYCAREAYEEWELTMGNLDHW |
| | | | GQGTLVTVSS |
| 331 | 5283 | 1587 | FTFSSFSMH |
| 331 | 5284 | 1588 | TTCACCTTCAGTAGTTTTTCTATGCAC |
| 331 | 5285 | 1589 | LISSDERNSYYADSVKG |
| 331 | 5286 | 1590 | CTTATATCATCTGACGAGAGGAATTCATACTACGCAG |
| | | | ACTCCGTGAAGGGC |
| 331 | 5287 | 1591 | AREAYEEWELTMGNLDH |
| 331 | 5288 | 1592 | GCGAGAGAGGCATACGAAGAGTGGGAGCTAACGATG |
| | | | GGGAACCTTGACCAC |
| 331 | 5289 | 1593 | GACATCCAGTTGACCCAGTCTCCATCCTCCCTGTCTGC |
| | | | ATCTGTAGGAGACAGAGTCACCATCACTTGCCGGGCA |
| | | | AGTCAGGGCATTGGAAATGATTTAGGCTGGTATCAGC |
| | | | AGAAACCAGGGAAAGCCCCTAAGCGCCTGATCTATAG |
| | | | TACATACAGCTTGCAAAGTGGGGTCCCATCAAGGTTC |
| | | | AGCGGCAGTGGATCTGGGACAGAATTCACTCTCACAA |
| | | | TCAGCAGCCTGCAGCCTGAAGATTTTGCAACTTATTAC |
| | | | TGTCTACAGCATAATCGTTACCCCTTCACTTTCGGCCC |
| | | | TGGGACCAAGCTGGAGATCAAA |
| 331 | 5290 | 1594 | DIQLTQSPSSLSASVGDRVTITCRASQGIGNDLGWYQQK |
| | | | PGKAPKRLIYSTYSLQSGVPSRFSGSGSGTEFTLTISSLQP |
| | | | EDFATYYCLQHNRYPFTFGPGTKLEIK |
| 331 | 5291 | 1595 | RASQGIGNDLG |
| 331 | 5292 | 1596 | CGGGCAAGTCAGGGCATTGGAAATGATTTAGGC |
| 331 | 5293 | 1597 | STYSLQS |
| 331 | 5294 | 1598 | AGTACATACAGCTTGCAAAGT |
| 331 | 5295 | 1599 | LQHNRYPFT |
| 331 | 5296 | 1600 | CTACAGCATAATCGTTACCCCTTCACT |
| 332 | 5297 | 1601 | CAGGTGCAGCTGCAGGAGTCGGGCCCAGGACTGGTGA |
| | | | AGCCTTCGGAGACCCTGTCCCTCACCTGCACTGTCTCT |
| | | | GGTGCCTCCGTCACCACTAATACTTACTACTGGACCTG |
| | | | GATCCGGCAGCCCCCAGGGAAGGAACTGGAGTGGATT |
| | | | GGATATATCCATCACACTGGGAACACCCACTACAACC |
| | | | CCTCCCTCGAGAGTCGACTCACCATGTCACTAGACAC |
| | | | GTCCAGGAACCAGTTCTCTCTGAACCTTAGGTCTGCCA |
| | | | CCACTGCGGACACGGCCGTTTATTACTGTGCGAGAGG |
| | | | CGAACATTTTGCGTACTGGTGGGGAAACTGGGGCCAG |
| | | | GGAGCCCTGGTCACCGTCTCCTCA |
| 332 | 5298 | 1602 | QVQLQESGPGLVKPSETLSLTCTVSGASVTTNTYYWTWI |
| | | | RQPPGKELEWIGYIHHTGNTHYNPSLESRLTMSLDTSRN |
| | | | QFSLNLRSATTADTAVYYCARGEHFAYWWGNWGQGA |
| | | | LVTVSS |
| 332 | 5299 | 1603 | ASVTTNTYYWT |
| 332 | 5300 | 1604 | GCCTCCGTCACCACTAATACTTACTACTGGACC |
| 332 | 5301 | 1605 | YIHHTGNTHYNPSLES |
| 332 | 5302 | 1606 | TATATCCATCACACTGGGAACACCCACTACAACCCCT |
| | | | CCCTCGAGAGT |
| 332 | 5303 | 1607 | ARGEHFAYWWGN |
| 332 | 5304 | 1608 | GCGAGAGGCGAACATTTTGCGTACTGGTGGGGAAAC |
| 332 | 5305 | 1609 | GACATCCGGGTGACCCAGTCTCCATCTTCCGTGTCTGC |
| | | | ATCTGTAGGAGACAGAGTCACCATCACTTGTCGGGCG |
| | | | AGTCAGGGTATTGCCAGATGGTTAGCCTGGTATCAGC |
| | | | AGAAACCAGGGAAAGCCCCTAAACTCCTGATCTATGC |
| | | | TGCATCCAGTTTGCAAGGTGGGGTCCCATCAAGGTTC |
| | | | AGCGGCAGTGGATATGGGACAGATTTCACTCTCACCA |
| | | | TCAGCAGCCTGCAGCCTGAAGATTTTGCAACTTACTA |
| | | | CTGTCAACAGGCTAACAGTTTTCCTCGAACGTTCGGCC |
| | | | AAGGGACCAAGGTGGAGATCAAA |
| 332 | 5306 | 1610 | DIRVTQSPSSVSASVGDRVTITCRASQGIARWLAWYQQK |
| | | | PGKAPKLLIYAASSLQGGVPSRFSGSGYGTDFTLTISSLQ |
| | | | PEDFATYYCQQANSFPRTFGQGTKVEIK |
| 332 | 5307 | 1611 | RASQGIARWLA |
| 332 | 5308 | 1612 | CGGGCGAGTCAGGGTATTGCCAGATGGTTAGCC |
| 332 | 5309 | 1613 | AASSLQG |
| 332 | 5310 | 1614 | GCTGCATCCAGTTTGCAAGGT |
| 332 | 5311 | 1615 | QQANSFPRT |
| 332 | 5312 | 1616 | CAACAGGCTAACAGTTTTCCTCGAACG |
| 333 | 5313 | 1617 | CAGGTCCAGCTTGTACAGTCTGGGCCTGAGGTGAAGA |
| | | | AGCCTGGGGCCTCAGTGAAGGTCTCCTGCGAGGCTTC |
| | | | TGGATACACCTTCACCGACTTCTTTGTGCACTGGGTGC |
| | | | GACAGGCCCCTGGTGAGGGGCTTGTGTGGTTGGGATG |
| | | | GGTCAACCCTCTCAGTGGCGCCACAAAGTATGCACAG |
| | | | AACTTTCAGGGCAGGGTCACCATGACCAGTGACACGT |
| | | | CCATCACCACAGCCTACATGGCACTGAGCAGCCTGAG |
| | | | ACATGACGACACGGCCGTCTATTACTGTACGAGCCAG |
| | | | ACTTCACCTTATACCCCGGGCGCTATGGGCGTTTGGG |
| | | | GCCAAGGGACCACGGTCACCGTCTCCTCA |
| 333 | 5314 | 1618 | QVQLVQSGPEVKKPGASVKVSCEASGYTFTDFFVHWVR |
| | | | QAPGEGLVWLGWVNPLSGATKYAQNFQGRVTMTSDTS |
| | | | ITTAYMALSSLRHDDTAVYYCTSQTSPYTPGAMGVWGQ |
| | | | GTTVTVSS |
| 333 | 5315 | 1619 | YTFTDFFVH |
| 333 | 5316 | 1620 | TACACCTTCACCGACTTCTTTGTGCAC |
| 333 | 5317 | 1621 | WVNPLSGATKYAQNFQG |
| 333 | 5318 | 1622 | TGGGTCAACCCTCTCAGTGGCGCCACAAAGTATGCAC |
| | | | AGAACTTTCAGGGC |
| 333 | 5319 | 1623 | TSQTSPYTPGAMGV |
| 333 | 5320 | 1624 | ACGAGCCAGACTTCACCTTATACCCCGGGCGCTATGG |
| | | | GCGTT |
| 333 | 5321 | 1625 | GACATCCGGGTGACCCAGTCTCCAGCCTCCCTGTCTGC |
| | | | ATTTGTTGGAGACAGAGTCACCATCACTTGCCGGGCA |
| | | | AGTCCGGCCATTAGCGGCTATTTAAGTTGGTATCAGC |
| | | | AGAAGGCAGGCAAAGCCCCTAAGATCCTGATCTATGA |
| | | | TGCATCTAATTTGTATAGTGGGGCCCCATCACGGTTCA |
| | | | GTGGCAGTAGATCTGGGACAGATTTCACTCTCACCAT |
| | | | CACCAGTCTGCAACCTGAAGATTTTGCAACTTACTACT |
| | | | GTCAACAGACTTACAATGGCCTAATCGCTTTCGGCCCT |
| | | | GGGACCAAGGTGGAAATCAAA |
| 333 | 5322 | 1626 | DIRVTQSPASLSAFVGDRVTITCRASPAISGYLSWYQQKA |
| | | | GKAPKILIYDASNLYSGAPSRFSGSRSGTDFTLTITSLQPE |
| | | | DFATYYCQQTYNGLIAFGPGTKVEIK |
| 333 | 5323 | 1627 | RASPAISGYLS |
| 333 | 5324 | 1628 | CGGGCAAGTCCGGCCATTAGCGGCTATTTAAGT |
| 333 | 5325 | 1629 | DASNLYS |
| 333 | 5326 | 1630 | GATGCATCTAATTTGTATAGT |
| 333 | 5327 | 1631 | QQTYNGLIA |
| 333 | 5328 | 1632 | CAACAGACTTACAATGGCCTAATCGCT |
| 334 | 5329 | 1633 | GAGGTGCAGCTGTTGGAGTCTGGGGGAGGCGTGGTCC |
| | | | AGCCTGGGAAGTCCCTGAGACTCTCCTGTGCAGCCTC |
| | | | TGGATTCACCTTCAATACCTATGCTATACACTGGGTCC |
| | | | GCCAGGCTCCAGGCAAGGGCCTGGAGTGGGTGGCAG |
| | | | CTATATCATATGATGGAAGCAATGAATACTACTCAAA |
| | | | CTCCGTGAAGGGCCGATTCACCATCTCCAGAGACAAT |
| | | | TCCAAGTACACGCTGGAGCTGCAAATGAACAGCCTGA |
| | | | GACCTGAGGACACGGCTGTGTATTACTGTGCGAGAGG |
| | | | CGCCTCCTACTACTATGTGAGTAGTGACCTTGGCTACT |
| | | | GGGGCCAGGGAACCCTGGTCACCGTCTCCTCA |
| 334 | 5330 | 1634 | EVQLLESGGGVVQPGKSLRLSCAASGFTFNTYAIHWVR |
| | | | QAPGKGLEWVAAISYDGSNEYYSNSVKGRFTISRDNSK |
| | | | YTLELQMNSLRPEDTAVYYCARGASYYYVSSDLGYWG |
| | | | QGTLVTVSS |
| 334 | 5331 | 1635 | FTFNTYAIH |
| 334 | 5332 | 1636 | TTCACCTTCAATACCTATGCTATACAC |
| 334 | 5333 | 1637 | AISYDGSNEYYSNSVKG |
| 334 | 5334 | 1638 | GCTATATCATATGATGGAAGCAATGAATACTACTCAA |
| | | | ACTCCGTGAAGGGC |
| 334 | 5335 | 1639 | ARGASYYYVSSDLGY |
| 334 | 5336 | 1640 | GCGAGAGGCGCCTCCTACTACTATGTGAGTAGTGACC |
| | | | TTGGCTAC |
| 334 | 5337 | 1641 | CAGTCTGTCGTGACGCAGCCGCCCTCAGTGTCTGGGG |
| | | | CCCCAGGGCAGAGGGTCACCATCTCCTGCACTGGGAG |
| | | | CAGCTCCAACATCGGGTCAGGTTATGATGTGCACTGG |
| | | | TACCAGCAGCTTCCAGGAACAGCCCCCAAAGTCGTCA |
| | | | TCTATGGTAACATCAATCGGCCCTCAGGGGTCCCTGA |
| | | | GCGATTCTCTGGCTCCAAGTCTGGCACCTCAGCCTCCC |
| | | | TGGCCATCACTGGGCTCCAGGCTGAGGATGAGGCTGA |
| | | | TTATTACTGCCAGTCCTATGACAGCCTGAGTGCCTCTT |
| | | | GGGTGTTCGGCGGAGGGACCAAGCTGACCGTCCTA |
| 334 | 5338 | 1642 | QSVVTQPPSVSGAPGQRVTISCTGSSSNIGSGYDVHWYQ |
| | | | QLPGTAPKVVIYGNINRPSGVPERFSGSKSGTSASLAITG |
| | | | LQAEDEADYYCQSYDSLSASWVFGGGTKLTVL |
| 334 | 5339 | 1643 | TGSSSNIGSGYDVH |
| 334 | 5340 | 1644 | ACTGGGAGCAGCTCCAACATCGGGTCAGGTTATGATG |
| | | | TGCAC |
| 334 | 5341 | 1645 | GNINRPS |
| 334 | 5342 | 1646 | GGTAACATCAATCGGCCCTCA |
| 334 | 5343 | 1647 | QSYDSLSASWV |
| 334 | 5344 | 1648 | CAGTCCTATGACAGCCTGAGTGCCTCTTGGGTG |
| 335 | 5345 | 1649 | CAGGTCCAGCTTGTGCAGTCTGGGGCTGAGGTGAAGA |
| | | | AGCCTGGGTCCTCGGTGAAGGTCTCCTGCAAGGCCTC |
| | | | TGGAGGCACCTTCAGCGGCCACGCTATCAACTGGGTG |
| | | | CGACAGGCCCCTGGACAAGGGCTCGAATGGATGGGA |
| | | | GGGATCATCCATATATTTGGGACAGTAAACTACGCTC |
| | | | CGAAGTTCCAGGGCAGAGTCACGATCACCGCGGACGC |
| | | | ATCCACGGGCACAGTTTACATGGAGTTGAGCAGCCTG |
| | | | ATATCTGAGGACACGGCCGTATATTATTGTGCGAGAG |
| | | | ATGCTTACGAAGTGTGGACTGGTTCTTATCTCCCCCCT |
| | | | TTTGACGACTGGGGCCAGGGAACCCTGGTCACTGTCT |
| | | | CCTCA |
| 335 | 5346 | 1650 | QVQLVQSGAEVKKPGSSVKVSCKASGGTFSGHAINWVR |
| | | | QAPGQGLEWMGGIIHIFGTVNYAPKFQGRVTITADASTG |
| | | | TVYMELSSLISEDTAVYYCARDAYEVWTGSYLPPFDDW |
| | | | GQGTLVTVSS |
| 335 | 5347 | 1651 | GTFSGHAIN |
| 335 | 5348 | 1652 | GGCACCTTCAGCGGCCACGCTATCAAC |
| 335 | 5349 | 1653 | GIIHIFGTVNYAPKFQG |
| 335 | 5350 | 1654 | GGGATCATCCATATATTTGGGACAGTAAACTACGCTC |
| | | | CGAAGTTCCAGGGC |
| 335 | 5351 | 1655 | ARDAYEVWTGSYLPPFDD |
| 335 | 5352 | 1656 | GCGAGAGATGCTTACGAAGTGTGGACTGGTTCTTATC |
| | | | TCCCCCCTTTTGACGAC |
| 335 | 5353 | 1657 | GATATTGTGATGACGCAGTCTCCAGGCACCCTGTCTTT |
| | | | GTCTCCCGGGGACAGAGTCACCCTCTCCTGCAGGGCC |
| | | | AGTCAGACTGTTACAAGCAGCTACTTAGCCTGGTACC |
| | | | AGCAGAAACCTGGCCAGGCTCCCAGGCTCCTCATCTA |
| | | | TGGTGCATTCACCAGGGCCACTGGCATCCCAGACAGG |
| | | | TTCAGTGGCAGTGGGTCTGGGACAGACTTCACTCTCA |
| | | | GCATCAGCAGACTGGAGCCTGAAGATTTTGCAGTATA |
| | | | TTATTGTCAGCAGTATGGTAGCTCATTCCTCACTTTCG |
| | | | GCGGAGGGACCAAAGTGGATATCAAA |
| 335 | 5354 | 1658 | DIVMTQSPGTLSLSPGDRVTLSCRASQTVTSSYLAWYQQ |
| | | | KPGQAPRLLIYGAFTRATGIPDRFSGSGSGTDFTLSISRLE |
| | | | PEDFAVYYCQQYGSSFLTFGGGTKVDIK |
| 335 | 5355 | 1659 | RASQTVTSSYLA |
| 335 | 5356 | 1660 | AGGGCCAGTCAGACTGTTACAAGCAGCTACTTAGCC |
| 335 | 5357 | 1661 | GAFTRAT |
| 335 | 5358 | 1662 | GGTGCATTCACCAGGGCCACT |
| 335 | 5359 | 1663 | QQYGSSFLT |
| 335 | 5360 | 1664 | CAGCAGTATGGTAGCTCATTCCTCACT |
| 336 | 5361 | 1665 | GAGGTGCAGCTGGTGGAATCTGGGGGAGGCCTGGTCA |
| | | | GGCCTGGGGGGTCCCTGAGACTCTCCTGTGCAGCCTC |
| | | | TGGATTCAGTCTCAGTAGTTACGGCATGAGTTGGGTC |
| | | | CGCCAGGCTCCAGGGAAGGGTCTGGAGTGGGTCTCAT |
| | | | CCATTACTGCCGGCAGTAGTTACATAAATTACGCTGA |
| | | | CTCAGTGAAGGGCCGGTTCACCATCTCCAGAGACAAC |
| | | | GCCAAGAGTTCACTGTTCCTGCAAATGACCAGCCTGA |
| | | | GAGTCGAGGACACGGCTGTTTATTTCTGTGTGAGAGA |
| | | | GGCGTATGCCAGCTCGTCGGCCCTTTACTGGTTCGACC |
| | | | CCTGGGGCCAGGGAACCCTGGTCACCGTCTCCTCA |
| 336 | 5362 | 1666 | EVQLVESGGGLVRPGGSLRLSCAASGFSLSSYGMSWVR |
| | | | QAPGKGLEWVSSITAGSSYINYADSVKGRFTISRDNAKS |
| | | | SLFLQMTSLRVEDTAVYFCVREAYASSSALYWFDPWGQ |
| | | | GTLVTVSS |
| 336 | 5363 | 1667 | FSLSSYGMS |
| 336 | 5364 | 1668 | TTCAGTCTCAGTAGTTACGGCATGAGT |
| 336 | 5365 | 1669 | SITAGSSYINYADSVKG |
| 336 | 5366 | 1670 | TCCATTACTGCCGGCAGTAGTTACATAAATTACGCTG |
| | | | ACTCAGTGAAGGGC |
| 336 | 5367 | 1671 | VREAYASSSALYWFDP |
| 336 | 5368 | 1672 | GTGAGAGAGGCGTATGCCAGCTCGTCGGCCCTTTACT |
| | | | GGTTCGACCCC |
| 336 | 5369 | 1673 | CAGTCTGTCCTGACGCAGCCGCCCTCAGTCTCTGGGG |
| | | | CCCCAGGGCAGAGGGTCACCATCTCCTGCACTGGGAG |
| | | | CAGCTCCAATCTCGGGGCGGGTTATGTTGTTCACTGGT |
| | | | ACCAGCAACTTCCAGGAACATCCCCCAAACTCCTCAT |
| | | | CTATGGTAACACCGATCGGCCCTCAGGGGTCCCCGAC |
| | | | CGATTCTCTGGCTCCAAGTCTGGCACCTCAGCCTCCCT |
| | | | GGCCATCAGTGGGCTCCAGGCTGAGGATGAGGCTGAT |
| | | | TATTACTGCCAGTCCTATGACAGTAGCCTGAGTGGCT |
| | | | GGGTGTTCGGCGGAGGGACCAAGCTGACCGTCCTA |
| 336 | 5370 | 1674 | QSVLTQPPSVSGAPGQRVTISCTGSSSNLGAGYVVHWYQ |
| | | | QLPGTSPKLLIYGNTDRPSGVPDRFSGSKSGTSASLAISGL |
| | | | QAEDEADYYCQSYDSSLSGWVFGGGTKLTVL |
| 336 | 5371 | 1675 | TGSSSNLGAGYVVH |
| 336 | 5372 | 1676 | ACTGGGAGCAGCTCCAATCTCGGGGCGGGTTATGTTG |
| | | | TTCAC |
| 336 | 5373 | 1677 | GNTDRPS |
| 336 | 5374 | 1678 | GGTAACACCGATCGGCCCTCA |
| 336 | 5375 | 1679 | QSYDSSLSGWV |
| 336 | 5376 | 1680 | CAGTCCTATGACAGTAGCCTGAGTGGCTGGGTG |
| 337 | 5377 | 1681 | GAGGTGCAGCTGGTGGAGTCTGGGGGAGGCTTAGTAC |
| | | | AGCCTGGGGGGTCCCTGCGACTCTCCTGTGCAGCCTCT |
| | | | GGATTCAGCTTCAATACCTATAGCATGAACTGGGTCC |
| | | | GCCAGGCTCCAGGGAAGGGATTGGAGTGGCTTTCATT |
| | | | CATTAGTAGTAGTAGTCATACCCTATACTACGCAGAC |
| | | | TCTGTGAAGGGCCGATTCACCGTCTTCAGAGACAATG |
| | | | CCAAGCACTCGCTCTTTCTGCAAATGAACGGCCTGAG |
| | | | AGACGAGGACACGGCTGTTTATTTCTGTGCGAGATCC |
| | | | CTTGGTTCGGGGAATTATGATAACGAAGATCAGACAT |
| | | | TTTACTACTACTACGGTATGGACGTCTGGGGCCAAGG |
| | | | GACCACGGTCACCGTCTCCTCA |
| 337 | 5378 | 1682 | EVQLVESGGGLVQPGGSLRLSCAASGFSFNTYSMNWVR |
| | | | QAPGKGLEWLSFISSSSHTLYYADSVKGRFTVFRDNAKH |
| | | | SLFLQMNGLRDEDTAVYFCARSLGSGNYDNEDQTFYYY |
| | | | YGMDVWGQGTTVTVSS |
| 337 | 5379 | 1683 | FSFNTYSMN |
| 337 | 5380 | 1684 | TTCAGCTTCAATACCTATAGCATGAAC |
| 337 | 5381 | 1685 | FISSSSHTLYYADSVKG |
| 337 | 5382 | 1686 | TTCATTAGTAGTAGTAGTCATACCCTATACTACGCAGA |
| | | | CTCTGTGAAGGGC |
| 337 | 5383 | 1687 | ARSLGSGNYDNEDQTFYYYYGMDV |
| 337 | 5384 | 1688 | GCGAGATCCCTTGGTTCGGGGAATTATGATAACGAAG |
| | | | ATCAGACATTTTACTACTACTACGGTATGGACGTC |
| 337 | 5385 | 1689 | GAAACGACACTCACGCAGTCTCCACTCTCCCTGCCCG |
| | | | TCACCCCTGGAGAGCCGGCCTCCATATCCTGCCGGTCT |
| | | | AGTCAGAGCCTCCTGTTTCATAGTAATGGACACAATT |
| | | | ATTTGGATTGGTACCTGCAGAAGCCAGGGCAGTCTCC |
| | | | ACAACTCCTGATCCATTTGGGTTCTAATCGGGCCTCCG |
| | | | GAGTCCCTGACAGGTTCAGTGGCAGTGGATCAGGCAC |
| | | | AGATTTTACACTGAAAATCAGCAGAGTGGAGCCTGAG |
| | | | GATGTTGGGGTTTATTACTGTATGCAAGCTCTACAAAC |
| | | | TCCGTACACTTTTGGCCAGGGGACCAAGGTGGAGATC |
| | | | AAA |
| 337 | 5386 | 1690 | ETTLTQSPLSLPVTPGEPASISCRSSQSLLFHSNGHNYLD |
| | | | WYLQKPGQSPQLLIHLGSNRASGVPDRFSGSGSGTDFTL |
| | | | KISRVEPEDVGVYYCMQALQTPYTFGQGTKVEIK |
| 337 | 5387 | 1691 | RSSQSLLFHSNGHNYLD |
| 337 | 5388 | 1692 | CGGTCTAGTCAGAGCCTCCTGTTTCATAGTAATGGAC |
| | | | ACAATTATTTGGAT |
| 337 | 5389 | 1693 | LGSNRAS |
| 337 | 5390 | 1694 | TTGGGTTCTAATCGGGCCTCC |
| 337 | 5391 | 1695 | MQALQTPYT |
| 337 | 5392 | 1696 | ATGCAAGCTCTACAAACTCCGTACACT |
| 338 | 5393 | 1697 | CAGGTGCAGCTGCAGGAGTCGGGCCCAGGACGGGTG |
| | | | AAGCCTTCACAGACCCTGTCCCTCACCTGCACTGTCTC |
| | | | TGGTGTCTCCGTCACCATTAATGATTACTACTGGACTT |
| | | | GGCTCCGCCAGTCCCCAGGGAAAGGCCTGGAGTGGAT |
| | | | TGGAAACATCTATAACAGTGGGAGCACCTACCAGAAC |
| | | | CCGTCCCTCCAGAGTCGAGTTACCATGTCAGTGGACA |
| | | | CGGCCAAGAACCACTTCTCCCTGAAGCTGACCTCTGT |
| | | | CACTGCCGCAGATACGGCCGTCTATTACTGTGCCAGA |
| | | | GATTTAGGCACTGCCAACAACTACTACTTCGGTATGG |
| | | | ACGTCTGGGGCCTAGGGACCACGGTCACCGTCTCCTC |
| | | | A |
| 338 | 5394 | 1698 | QVQLQESGPGRVKPSQTLSLTCTVSGVSVTINDYYWTW |
| | | | LRQSPGKGLEWIGNIYNSGSTYQNPSLQSRVTMSVDTAK |
| | | | NHFSLKLTSVTAADTAVYYCARDLGTANNYYFGMDVW |
| | | | GLGTTVTVSS |
| 338 | 5395 | 1699 | VSVTINDYYWT |
| 338 | 5396 | 1700 | GTCTCCGTCACCATTAATGATTACTACTGGACT |
| 338 | 5397 | 1701 | NIYNSGSTYQNPSLQS |
| 338 | 5398 | 1702 | AACATCTATAACAGTGGGAGCACCTACCAGAACCCGT |
| | | | CCCTCCAGAGT |
| 338 | 5399 | 1703 | ARDLGTANNYYFGMDV |
| 338 | 5400 | 1704 | GCCAGAGATTTAGGCACTGCCAACAACTACTACTTCG |
| | | | GTATGGACGTC |
| 338 | 5401 | 1705 | GATATTGTGCTGACGCAGTCTCCAGCCACCCTGTCTTT |
| | | | GTCTCCAGGGGAAAGAGCCACTCTCTCCTGCAGGGCC |
| | | | AGTCAGAGTGTTAGCACCTACTTAGCCTGGTACCAAC |
| | | | AGAAACCTGGCCAGGCTCCCAGGCTCCTCATCTATAA |
| | | | TGGATCCAACAGGGTCACTGGCACCCCAGCCAGGTTC |
| | | | AGTGGCAGTGGGTCTGGGACAGACTTCACTCTCACCA |
| | | | TCAGCAGCGTAGAGCCTGAAGATTTTGCAGTTTATTA |
| | | | CTGTCAGCAGCGTAGCAACTGGCCTCCGTACACTTTTG |
| | | | GCCAGGGGACCAAGGTGGAGATCAAA |
| 338 | 5402 | 1706 | DIVLTQSPATLSLSPGERATLSCRASQSVSTYLAWYQQK |
| | | | PGQAPRLLIYNGSNRVTGTPARFSGSGSGTDFTLTISSVEP |
| | | | EDFAVYYCQQRSNWPPYTFGQGTKVEIK |
| 338 | 5403 | 1707 | RASQSVSTYLA |
| 338 | 5404 | 1708 | AGGGCCAGTCAGAGTGTTAGCACCTACTTAGCC |
| 338 | 5405 | 1709 | NGSNRVT |
| 338 | 5406 | 1710 | AATGGATCCAACAGGGTCACT |
| 338 | 5407 | 1711 | QQRSNWPPYT |
| 338 | 5408 | 1712 | CAGCAGCGTAGCAACTGGCCTCCGTACACT |
| 339 | 5409 | 1713 | GAGGTGCAGCTGGTGGAGTCGGGCCCTGGACTGGTGA |
| | | | AGCCTTCAGAGACCCTGTCCCTCAGTTGCATTGTCTCT |
| | | | GGTGACTCCATCACCAGTAATGATTACTACTGGAGTT |
| | | | GGATCCGCCAGTCCCCAGGGAAGGGCCTGGAGTGGAT |
| | | | TGGGTACATCTATCACAGCGGGGCCACCTTCTACACT |
| | | | CCGTCCCTACGGAGTCGAGTGACCATATCGACAGACA |
| | | | GGTCCAAGAACCAGTTCTCCCTGAGACTGTCGTCTGT |
| | | | GACCGCCGCAGACACGGCCGTATATTATTGTGCCAGT |
| | | | GGACCTGTGGGGATGGCTACAAGCAACTGGTTCGACC |
| | | | CCTGGGGCCAGGGAACCCTGGTCACCGTCTCTTCA |
| 339 | 5410 | 1714 | EVQLVESGPGLVKPSETLSLSCIVSGDSITSNDYYWSWIR |
| | | | QSPGKGLEWIGYIYHSGATFYTPSLRSRVTISTDRSKNQF |
| | | | SLRLSSVTAADTAVYYCASGPVGMATSNWFDPWGQGT |
| | | | LVTVSS |
| 339 | 5411 | 1715 | DSITSNDYYWS |
| 339 | 5412 | 1716 | GACTCCATCACCAGTAATGATTACTACTGGAGT |
| 339 | 5413 | 1717 | YIYHSGATFYTPSLRS |
| 339 | 5414 | 1718 | TACATCTATCACAGCGGGGCCACCTTCTACACTCCGTC |
| | | | CCTACGGAGT |
| 339 | 5415 | 1719 | ASGPVGMATSNWFDP |
| 339 | 5416 | 1720 | GCCAGTGGACCTGTGGGGATGGCTACAAGCAACTGGT |
| | | | TCGACCCC |
| 339 | 5417 | 1721 | CAGCCTGTGCTGACTCAGCCACCCTCAGTGTCAGTCG |
| | | | CCCCGGGAAAGACGGCCACTCTTACGTGTGGGGGAGA |
| | | | CATCATTAGAACTAACAGTGTGAACTGGTACCAGCAG |
| | | | AAGCCAGGCCAGGCCCCTGTATTGATCATATATTATG |
| | | | ATAGCGACCGGCCCTCAGGGATCCCTGGGCGATTCTC |
| | | | TGCCTCCAACTCTGGGAGCGCGGCCACCCTGACCATC |
| | | | AGCAGGGTCGAAGCCGGGGATGAGGCCGACTATTACT |
| | | | GTCAGGTGTGGGACAGCAGTACTGATTATCACGTGGT |
| | | | TTTCGGCGGAGGGACCAAGCTCACCGTCCTA |
| 339 | 5418 | 1722 | QPVLTQPPSVSVAPGKTATLTCGGDIIRTNSVNWYQQKP |
| | | | GQAPVLIIYYDSDRPSGIPGRFSASNSGSAATLTISRVEAG |
| | | | DEADYYCQVWDSSTDYHVVFGGGTKLTVL |
| 339 | 5419 | 1723 | GGDIIRTNSVN |
| 339 | 5420 | 1724 | GGGGGAGACATCATTAGAACTAACAGTGTGAAC |
| 339 | 5421 | 1725 | YDSDRPS |
| 339 | 5422 | 1726 | TATGATAGCGACCGGCCCTCA |
| 339 | 5423 | 1727 | QVWDSSTDYHVV |
| 339 | 5424 | 1728 | CAGGTGTGGGACAGCAGTACTGATTATCACGTGGTT |
| | | | CAGGTCCAGCTGGTACAGTCTGGGGCTGAGGTGAAGA |
| | | | AGCCTGGGGCCTCAGTGAAGGTTTCCTGCAAGGCATC |
| | | | TGGATACATCTTCACCGGTTATTTTATACACTGGGTGC |
| | | | GACAGGCCCCCGGACAAGGGCTTGAGTGGATGGGAG |
| | | | TAATCAATCCCAGAGGTGGAAGCACAAGCTACGCACA |
| 340 | 5425 | 1729 | AAAGTTCCAGGGCAGAGTCGCTGTGTCCAGGGACACG |
| | | | TCCACGACTACAGTCTACATGGAGCTGAACAGCCTGA |
| | | | GATCTGAGGACACGGCCGTATATTACTGTGCGAGAGC |
| | | | CCCGAGCCACGATGAGTGGGTCGCAATTTCCCGAAAT |
| | | | AACGATGTTGTGGGGTTCGACGCCTGGGGCCAGGGAA |
| | | | CCCTGGTCACCGTCTCCTCA |
| 340 | 5426 | 1730 | QVQLVQSGAEVKKPGASVKVSCKASGYIFTGYFIHWVR |
| | | | QAPGQGLEWMGVINPRGGSTSYAQKFQGRVAVSRDTST |
| | | | TTVYMELNSLRSEDTAVYYCARAPSHDEWVAISRNNDV |
| | | | VGFDAWGQGTLVTVSS |
| 340 | 5427 | 1731 | YIFTGYFIH |
| 340 | 5428 | 1732 | TACATCTTCACCGGTTATTTTATACAC |
| 340 | 5429 | 1733 | VINPRGGSTSYAQKFQG |
| 340 | 5430 | 1734 | GTAATCAATCCCAGAGGTGGAAGCACAAGCTACGCAC |
| | | | AAAAGTTCCAGGGC |
| 340 | 5431 | 1735 | ARAPSHDEWVAISRNNDVVGFDA |
| 340 | 5432 | 1736 | GCGAGAGCCCCGAGCCACGATGAGTGGGTCGCAATTT |
| | | | CCCGAAATAACGATGTTGTGGGGTTCGACGCC |
| 340 | 5433 | 1737 | CAGTCTGTCCTGACTCAGCCGCCCTCAGTGTCTGGGGC |
| | | | CCCAGGGCAGAGGGTCACCATCTCCTGCACTGGGGGC |
| | | | AGCTCCAACATCGGGGCAGATTATGACGTACACTGGT |
| | | | ACCAGCAGCCTCCAGGAACAGCCCCCAAACTCCTCAT |
| | | | ATTTGCTAACAACAATCGACCCTCAGGGGTCCCTGGC |
| | | | CGATTCTCTGGCTCCAAGTCTGGCACCTCAGCCTCCCT |
| | | | GGCCATCACTGGGCTCCAGGCTGAGGATGAGGCTGAT |
| | | | TATTACTGCCAGTCCTATGACAGCAGCCTGAGTGCTTG |
| | | | GGTGTTCGGCGGGGGGACCAAGCTGACCGTCCTA |
| 340 | 5434 | 1738 | QSVLTQPPSVSGAPGQRVTISCTGGSSNIGADYDVHWYQ |
| | | | QPPGTAPKLLIFANNNRPSGVPGRFSGSKSGTSASLAITG |
| | | | LQAEDEADYYCQSYDSSLSAWVFGGGTKLTVL |
| 340 | 5435 | 1739 | TGGSSNIGADYDVH |
| 340 | 5436 | 1740 | ACTGGGGGCAGCTCCAACATCGGGGCAGATTATGACG |
| | | | TACAC |
| 340 | 5437 | 1741 | ANNNRPS |
| 340 | 5438 | 1742 | GCTAACAACAATCGACCCTCA |
| 340 | 5439 | 1743 | QSYDSSLSAWV |
| 340 | 5440 | 1744 | CAGTCCTATGACAGCAGCCTGAGTGCTTGGGTG |
| 341 | 5441 | 1745 | GAGGTGCAGCTGGTGGAGTCTGGGGGAGGCCTGGTCA |
| | | | AGCCTGGGGGGTCCCTGAGACTCTCCTGTGCAGCCTC |
| | | | TGGATTCACCCTCAGTAGTTATGCCATGAACTGGGTCC |
| | | | GCCAGGCTCCAGGGAAGGGTCTGGAGTGGGTCTCATC |
| | | | CATTAGTGCTGGAAGTAGTTACATCGACTACGCAGAC |
| | | | TCAGTGAAGGGCCGATTCACCATCTCCAGAGACAACG |
| | | | CCAAGAACTCTCTGTATCTGCAAATGAACAACCTGAG |
| | | | AGCCGAGGACACGGCTCTGTATTACTGTGCGAGAGAA |
| | | | GTTTTACCAGCAACCGCTATAGGAGGCGCCTGGCTCG |
| | | | ACCCCTGGGGCCAGGGAACCCTGGTCACTGTCTCCTC |
| | | | A |
| 341 | 5442 | 1746 | EVQLVESGGGLVKPGGSLRLSCAASGFTLSSYAMNWVR |
| | | | QAPGKGLEWVSSISAGSSYIDYADSVKGRFTISRDNAKN |
| | | | SLYLQMNNLRAEDTALYYCAREVLPATAIGGAWLDPW |
| | | | GQGTLVTVSS |
| 341 | 5443 | 1747 | FTLSSYAMN |
| 341 | 5444 | 1748 | TTCACCCTCAGTAGTTATGCCATGAAC |
| 341 | 5445 | 1749 | SISAGSSYIDYADSVKG |
| 341 | 5446 | 1750 | TCCATTAGTGCTGGAAGTAGTTACATCGACTACGCAG |
| | | | ACTCAGTGAAGGGC |
| 341 | 5447 | 1751 | AREVLPATAIGGAWLDP |
| 341 | 5448 | 1752 | GCGAGAGAAGTTTTACCAGCAACCGCTATAGGAGGCG |
| | | | CCTGGCTCGACCCC |
| 341 | 5449 | 1753 | CAGTCTGTCCTGACGCAGCCGCCCTCAGTGTCTGGGG |
| | | | CCCCAGGGCAGACGGTCACCATCTCCTGCACTGGGAG |
| | | | CAGCTCCAACATCGGGGCTGGATATGATGTCCACTGG |
| | | | TACCGGCAGCTTCCAGGAACAGCCCCCAAACTCCTCA |
| | | | TCTATTCTAACAACAATCGGCCCTCAGGGGTCCCTGA |
| | | | CCGATTCTCTGGCTCCAAGTCTGACACCTCAGCCTCCC |
| | | | TGGCCATCACTGGGCTCCAGGCTGGGGATGAGGCTGA |
| | | | TTATTACTGCCAGTCCTATGACATCAGCCTGAGTGCCT |
| | | | CTTATGTCTTCGGAACTGGGACCAAGGTCACCGTCCT |
| | | | A |
| 341 | 5450 | 1754 | QSVLTQPPSVSGAPGQTVTISCTGSSSNIGAGYDVHWYR |
| | | | QLPGTAPKLLIYSNNNRPSGVPDRFSGSKSDTSASLAITG |
| | | | LQAGDEADYYCQSYDISLSASYVFGTGTKVTVL |
| 341 | 5451 | 1755 | TGSSSNIGAGYDVH |
| 341 | 5452 | 1756 | ACTGGGAGCAGCTCCAACATCGGGGCTGGATATGATG |
| | | | TCCAC |
| 341 | 5453 | 1757 | SNNNRPS |
| 341 | 5454 | 1758 | TCTAACAACAATCGGCCCTCA |
| 341 | 5455 | 1759 | QSYDISLSASYV |
| 341 | 5456 | 1760 | CAGTCCTATGACATCAGCCTGAGTGCCTCTTATGTC |
| 342 | 5457 | 1761 | CAGGTCCAGCTGGTGCAGTCTGGAGCTGAGGTGAAGA |
| | | | AGCCTGGGGCCTCAGTGAAGGTCTCCTGCAAGGCTTC |
| | | | TGGTTACACCTTTACCAACTATGGTTTCAGCTGGGTGC |
| | | | GACAGGCCCCTGGACAAGGGCTTGAGTGGATGGGATG |
| | | | GATCCTCACTCACAATGGTTACACAAACTATGCACAG |
| | | | AAGTTCCAGGACAGAGTCACCATGAAGACAGACACAT |
| | | | CCACGAGCACAGTCTACATGGAGCTGAGGAGCCTGAG |
| | | | ATCTGTCGACACGGCCGTGTATTACTGTGCGAGAATT |
| | | | GGCCATGTTACAGCCGTGGCTGGTGCCCCTCCTGACT |
| | | | ACTGGGGCCAGGGAACCCTGGTCACCGTCTCCTCA |
| 342 | 5458 | 1762 | QVQLVQSGAEVKKPGASVKVSCKASGYTFTNYGFSWV |
| | | | RQAPGQGLEWMGWILTHNGYTNYAQKFQDRVTMKTD |
| | | | TSTSTVYMELRSLRSVDTAVYYCARIGHVTAVAGAPPD |
| | | | YWGQGTLVTVSS |
| 342 | 5459 | 1763 | YTFTNYGFS |
| 342 | 5460 | 1764 | TACACCTTTACCAACTATGGTTTCAGC |
| 342 | 5461 | 1765 | WILTHNGYTNYAQKFQD |
| 342 | 5462 | 1766 | TGGATCCTCACTCACAATGGTTACACAAACTATGCAC |
| | | | AGAAGTTCCAGGAC |
| 342 | 5463 | 1767 | ARIGHVTAVAGAPPDY |
| 342 | 5464 | 1768 | GCGAGAATTGGCCATGTTACAGCCGTGGCTGGTGCCC |
| | | | CTCCTGACTAC |
| 342 | 5465 | 1769 | CAGCCTGTGCTGACTCAGCCTGCCTCCGTGTCTGGGTA |
| | | | TCAAGGACAGTCGATCACCATCTCCTGCAGTGGAACC |
| | | | AGCAGTGATGTTGGGACTTATAACCTTGTCTCCTGGTA |
| | | | CCAACAACACCCAGGCAAAGCCCCCGAACTCATGATT |
| | | | TATGAGGGCAGTAAGCGGCCCTCAGGGGTTTCTGATC |
| | | | GCTTCTCTGGCTCCAAGTCTGGCAACACGGCCTCCCTG |
| | | | ACAATCTCTGGGCTCCAGGCTGAGGACGAGGCTGATT |
| | | | ATTACTGCTGCTCATATGTAGCTGGTAGTACTTCAGTA |
| | | | TTCGGCGGAGGGACCAAGCTCACCGTCCTA |
| 342 | 5466 | 1770 | QPVLTQPASVSGYQGQSITISCSGTSSDVGTYNLVSWYQ |
| | | | QHPGKAPELMIYEGSKRPSGVSDRFSGSKSGNTASLTISG |
| | | | LQAEDEADYYCCSYVAGSTSVFGGGTKLTVL |
| 342 | 5467 | 1771 | SGTSSDVGTYNLVS |
| 342 | 5468 | 1772 | AGTGGAACCAGCAGTGATGTTGGGACTTATAACCTTG |
| | | | TCTCC |
| 342 | 5469 | 1773 | EGSKRPS |
| 342 | 5470 | 1774 | GAGGGCAGTAAGCGGCCCTCA |
| 342 | 5471 | 1775 | CSYVAGSTSV |
| 342 | 5472 | 1776 | TGCTCATATGTAGCTGGTAGTACTTCAGTA |
| 343 | 5473 | 1777 | GAGGTGCAGCTGGTGGAGTCGGGCCCTGGACTGGTGA |
| | | | AGCCTTCAGAGACCCTGTCCCTCAGTTGCATTGTCTCT |
| | | | GGTGGCTCCATCACCAGTGGTGATTACTACTGGAGTT |
| | | | GGCTCCGCCAGTCCCCAGGGAAGGGCCTGGAGTGGAT |
| | | | TGGGTACATATATCACAGCGGGGCCACCTTCTACACC |
| | | | CCGTCCCTACGGAGTCGAGTGACCATTTCGACAGACA |
| | | | CCTCCAAGAACCAATTCTCCCTGAGACTGTCGTCTGTG |
| | | | ACCGCCGCAGACACGGCCGTTTATTATTGTGCCAGTG |
| | | | GACCTGTCGGGATGGCTACAAGCAACTGGTTCGACCC |
| | | | CTGGGGCCAGGGAACCCTGGTCACCGTCTCCTCA |
| 343 | 5474 | 1778 | EVQLVESGPGLVKPSETLSLSCIVSGGSITSGDYYWSWLR |
| | | | QSPGKGLEWIGYIYHSGATFYTPSLRSRVTISTDTSKNQF |
| | | | SLRLSSVTAADTAVYYCASGPVGMATSNWFDPWGQGT |
| | | | LVTVSS |
| 343 | 5475 | 1779 | GSITSGDYYWS |
| 343 | 5476 | 1780 | GGCTCCATCACCAGTGGTGATTACTACTGGAGT |
| 343 | 5477 | 1781 | YIYHSGATFYTPSLRS |
| 343 | 5478 | 1782 | TACATATATCACAGCGGGGCCACCTTCTACACCCCGT |
| | | | CCCTACGGAGT |
| 343 | 5479 | 1783 | ASGPVGMATSNWFDP |
| 343 | 5480 | 1784 | GCCAGTGGACCTGTCGGGATGGCTACAAGCAACTGGT |
| | | | TCGACCCC |
| 343 | 5481 | 1785 | TCCTATGAGCTGACACAGCCACCCTCAGTATCAGTCG |
| | | | CCCCGGGAAAGACGGCCACCATTACGTGTGGGGGAG |
| | | | ACATCATTAGAACTAACAGTGTGAACTGGTACCAGCA |
| | | | GAAGCCAGGCCAGGCCCCTCTATTGCTCATCTATTATG |
| | | | ATAGCGACCGGCCCTCAGGGATCCCTGAGCGATTCTC |
| | | | TGCCTCCAACTCTGGGAACACGGCCACCCTGACCATC |
| | | | AGCAGGGTCGAGGCCGGGGATGAGGCCGACTATTACT |
| | | | GTCAGGTGTGGGACAGTGGTACTGATTATCACGTGGT |
| | | | TTTCGGCGGAGGGACCAAGCTGACCGTCCAA |
| 343 | 5482 | 1786 | SYELTQPPSVSVAPGKTATITCGGDIIRTNSVNWYQQKP |
| | | | GQAPLLLIYYDSDRPSGIPERFSASNSGNTATLTISRVEAG |
| | | | DEADYYCQVWDSGTDYHVVFGGGTKLTVQ |
| 343 | 5483 | 1787 | GGDIIRTNSVN |
| 343 | 5484 | 1788 | GGGGGAGACATCATTAGAACTAACAGTGTGAAC |
| 343 | 5485 | 1789 | YDSDRPS |
| 343 | 5486 | 1790 | TATGATAGCGACCGGCCCTCA |
| 343 | 5487 | 1791 | QVWDSGTDYHVV |
| 343 | 5488 | 1792 | CAGGTGTGGGACAGTGGTACTGATTATCACGTGGTT |
| 344 | 5489 | 1793 | CAGGTCCAGCTGGTACAGTCTGGGGCTGAGGTGAAGA |
| | | | GGCCTGGGGCCTCAGTGAAAGTCTCCTGCAAGGCTTC |
| | | | TGAATACGCCTTCACCGCCCACTATCTTCACTGGGTGC |
| | | | GACAGGCCCCTGATCAAGGACTTGAGTGGATGGGATG |
| | | | GATCAGCCCTAAAAGTGGTGGCACCAACTATGCACAG |
| | | | AAGTTTCACGGCAGGGTCAGCATGACCAGTGACACGT |
| | | | CCATCAGTACAGTCTATATGGAACTGAGCAGCCTGAC |
| | | | ATCTGACGACACGGCCGTCTATTACTGTGCGAGAAGC |
| | | | AGTCTGGTGGGAGCAAGCCCCAACTTTGACTTCTGGG |
| | | | GCCAGGGAACCCTGGTCACCGTCTCCTCA |
| 344 | 5490 | 1794 | QVQLVQSGAEVKRPGASVKVSCKASEYAFTAHYLHWV |
| | | | RQAPDQGLEWMGWISPKSGGTNYAQKFHGRVSMTSDT |
| | | | SISTVYMELSSLTSDDTAVYYCARSSLVGASPNFDFWGQ |
| | | | GTLVTVSS |
| 344 | 5491 | 1795 | YAFTAHYLH |
| 344 | 5492 | 1796 | TACGCCTTCACCGCCCACTATCTTCAC |
| 344 | 5493 | 1797 | WISPKSGGTNYAQKFHG |
| 344 | 5494 | 1798 | TGGATCAGCCCTAAAAGTGGTGGCACCAACTATGCAC |
| | | | AGAAGTTTCACGGC |
| 344 | 5495 | 1799 | ARSSLVGASPNFDF |
| 344 | 5496 | 1800 | GCGAGAAGCAGTCTGGTGGGAGCAAGCCCCAACTTTG |
| | | | ACTTC |
| 344 | 5497 | 1801 | CAGTCTGTGGTGACGCAGCCGCCCTCAGTGTCTGCGG |
| | | | CCCCAGGACAGAGGGTCACCATCTCCTGCTCTGGAAG |
| | | | CAGCTCCAACATTGGGAATAATTATGTATCCTGGTAC |
| | | | CAGCAACTCCCAGGATCTACCCCCAAAGTCCTCATTT |
| | | | ACGACAATAATCAGCGACCCTCAGGGATTCCTGACCG |
| | | | TTTCTCTGGCTCCAAGTCTGGCACGTCAGCCACCCTGG |
| | | | CCATCAGCGGACTCCAGACTGGCGACGAGGCCGTCTA |
| | | | TTATTGCGGAACATGGGATGCCAGCCTGAGTGCTGCA |
| | | | ATGGTTTTCGGCGGGGGGACCAAGCTCACCGTCCTA |
| 344 | 5498 | 1802 | QSVVTQPPSVSAAPGQRVTISCSGSSSNIGNNYVSWYQQ |
| | | | LPGSTPKVLIYDNNQRPSGIPDRFSGSKSGTSATLAISGLQ |
| | | | TGDEAVYYCGTWDASLSAAMVFGGGTKLTVL |
| 344 | 5499 | 1803 | SGSSSNIGNNYVS |
| 344 | 5500 | 1804 | TCTGGAAGCAGCTCCAACATTGGGAATAATTATGTAT |
| | | | CC |
| 344 | 5501 | 1805 | DNNQRPS |
| 344 | 5502 | 1806 | GACAATAATCAGCGACCCTCA |
| 344 | 5503 | 1807 | GTWDASLSAAMV |
| 344 | 5504 | 1808 | GGAACATGGGATGCCAGCCTGAGTGCTGCAATGGTT |
| 345 | 5505 | 1809 | CAGGTGCAGCTACAGCAGTGGGGCGCAGGACTGTTGA |
| | | | AGCCTTCGGAGACCCTGTCCCTAACCTGCGCTGTCTCT |
| | | | GGTGGGTACTTCATTAATGACAACTGGAGCTGGATCC |
| | | | GCCAGTCCCCAGGGAAGGGGCTGGAGTGGATTGGAG |
| | | | AAATTAGTCATAGTGGAAGCACCAACTACAATCCGTC |
| | | | CCTCAAGAGTCGACTCACCATATCAGTTGACACGTCC |
| | | | AGGCAGCAGTTTTCCCTGAAATTGAGCTCTGTGACCG |
| | | | CCGCGGACAGTGGTGTTTACTACTGTGCGCGAGTCCA |
| | | | CCCGTCGTATGACTTTGGCTGGCGCTTCTTTGACTTCT |
| | | | GGGGCCAGGGAACCCTGGTCACCGTCTCTTCA |
| 345 | 5506 | 1810 | QVQLQQWGAGLLKPSETLSLTCAVSGGYFINDNWSWIR |
| | | | QSPGKGLEWIGEISHSGSTNYNPSLKSRLTISVDTSRQQFS |
| | | | LKLSSVTAADSGVYYCARVHPSYDFGWRFFDFWGQGTL |
| | | | VTVSS |
| 345 | 5507 | 1811 | GYFINDNWS |
| 345 | 5508 | 1812 | GGGTACTTCATTAATGACAACTGGAGC |
| 345 | 5509 | 1813 | EISHSGSTNYNPSLKS |
| 345 | 5510 | 1814 | GAAATTAGTCATAGTGGAAGCACCAACTACAATCCGT |
| | | | CCCTCAAGAGT |
| 345 | 5511 | 1815 | ARVHPSYDFGWRFFDF |
| 345 | 5512 | 1816 | GCGCGAGTCCACCCGTCGTATGACTTTGGCTGGCGCTT |
| | | | CTTTGACTTC |
| 345 | 5513 | 1817 | GAAACGACACTCACGCAGTCTCCAGCCACCCTGTCTG |
| | | | TGTCTCCAGGGGATACAGCCACCCTCTCCTGCAGGGC |
| | | | CAGTCAGACTATTAGTTCCAACTTAGCCTGGTACCAG |
| | | | CAGAAACCTGGCCAGCCTCCCAGTCTCCTCATCTATG |
| | | | GAGCATCCAACAGGGCCACTGGTATCCCAGACAGGTT |
| | | | TCGTGGCAGTGGGTCTGGGACAGAGTTCACTCTCACC |
| | | | ATCAGCAGCCTGCAGTCTGAAGATTTTGCAGTTTATTA |
| | | | CTGTCAGCAGTATGCATACTGGCCTCCGTACACTTTTG |
| | | | GCCAGGGGACCAAGGTGGAGATCAAA |
| 345 | 5514 | 1818 | ETTLTQSPATLSVSPGDTATLSCRASQTISSNLAWYQQKP |
| | | | GQPPSLLIYGASNRATGIPDRFRGSGSGTEFTLTISSLQSE |
| | | | DFAVYYCQQYAYWPPYTFGQGTKVEIK |
| 345 | 5515 | 1819 | RASQTISSNLA |
| 345 | 5516 | 1820 | AGGGCCAGTCAGACTATTAGTTCCAACTTAGCC |
| 345 | 5517 | 1821 | GASNRAT |
| 345 | 5518 | 1822 | GGAGCATCCAACAGGGCCACT |
| 345 | 5519 | 1823 | QQYAYWPPYT |
| 345 | 5520 | 1824 | CAGCAGTATGCATACTGGCCTCCGTACACT |
| 346 | 5521 | 1825 | GAGGTGCAGCTGTTGGAGTCGGGCCCAGGACTGGTGA |
| | | | AGCCTTCACAGACCCTGTCCCTCACCTGCACTGTCTCG |
| | | | GGTGGCTCCATCAACAGTATTGATTATTATTGGAGCTG |
| | | | GATCCGCCAGCCCCCAGGGAAGGGCCTGGAGTGGATT |
| | | | GGCTACATTTATCACAGTGGGAGCACCCACTACAGAC |
| | | | CATCCCTCAAGAGTCGAGTAACGATATCATTAGACAA |
| | | | GGCCAAGAACGAGTTCTCGCTGAGTCTGACCTCTGTG |
| | | | ACTGCCGCAGACACGGCCGTGTATTTCTGTGCCAGTG |
| | | | GCCCCGTCGGGATGGCAACAAGCAACTGGTTCGACCC |
| | | | CTGGGGCCAGGGAACCCTGGTCACCGTCTCCTCA |
| 346 | 5522 | 1826 | EVQLLESGPGLVKPSQTLSLTCTVSGGSINSIDYYWSWIR |
| | | | QPPGKGLEWIGYIYHSGSTHYRPSLKSRVTISLDKAKNEF |
| | | | SLSLTSVTAADTAVYFCASGPVGMATSNWFDPWGQGTL |
| | | | VTVSS |
| 346 | 5523 | 1827 | GSINSIDYYWS |
| 346 | 5524 | 1828 | GGCTCCATCAACAGTATTGATTATTATTGGAGC |
| 346 | 5525 | 1829 | YIYHSGSTHYRPSLKS |
| 346 | 5526 | 1830 | TACATTTATCACAGTGGGAGCACCCACTACAGACCAT |
| | | | CCCTCAAGAGT |
| 346 | 5527 | 1831 | ASGPVGMATSNWFDP |
| 346 | 5528 | 1832 | GCCAGTGGCCCCGTCGGGATGGCAACAAGCAACTGGT |
| | | | TCGACCCC |
| 346 | 5529 | 1833 | CAGCCTGTGCTGACTCAGCCACCCTCAGTGTCAGTGA |
| | | | CCCCAGGAGAGACGGCCAGGCTTCCCTGTGAGGGAGA |
| | | | CATCGTTGTCACTAACAGTGTCCACTGGTACCAGCAG |
| | | | AAGCCAGGCCAGGCCCCTGTTTTGGTCGTCTATTATGA |
| | | | TAGCGACCGGGCCTCAGGGATCCCTGAGCGATTCTCT |
| | | | GGCTCCAATTCTGGGAACACGGCCACCCTGAGCATCA |
| | | | GCAGGGTCGAAGCCGGGGATGAGGCCGACTACTATTG |
| | | | TCAGGTGTGGGATAGTAGTACTGATCATCATGTGGTG |
| | | | TTCGGCGGTGGGACCAAGCTCACCGTCCTA |
| 346 | 5530 | 1834 | QPVLTQPPSVSVTPGETARLPCEGDIVVTNSVHWYQQKP |
| | | | GQAPVLVVYYDSDRASGIPERFSGSNSGNTATLSISRVEA |
| | | | GDEADYYCQVWDSSTDHHVVFGGGTKLTVL |
| 346 | 5531 | 1835 | EGDIVVTNSVH |
| 346 | 5532 | 1836 | GAGGGAGACATCGTTGTCACTAACAGTGTCCAC |
| 346 | 5533 | 1837 | YDSDRAS |
| 346 | 5534 | 1838 | TATGATAGCGACCGGGCCTCA |
| 346 | 5535 | 1839 | QVWDSSTDHHVV |
| 346 | 5536 | 1840 | CAGGTGTGGGATAGTAGTACTGATCATCATGTGGTG |
| 347 | 5537 | 1841 | CAGGTCCAGCTGGTGCAGTCTGGGGCTGAGGTGAAGA |
| | | | AGCCTGGGTCCTCGGTGAAGGTCTCCTGCAAGGCTTC |
| | | | TGGAGGCAGATTCAGCAGCGACGCTATCAGCTGGGTG |
| | | | CGACAGGCCCCTGGACAAGGGCTTGAGTGGATGGGA |
| | | | GGAATCATCCCTATCCGTGGGACACCAACCTACGCAC |
| | | | AGAAGTTCCAGGGCAGAGTCACGATTATCGCGGACGA |
| | | | ATCCACGACTACATCCTACATGGAGATGAGCAGCCTG |
| | | | AGATCTGAGGACACGGCCGTGTATTACTGTGCGAGAC |
| | | | CGAATTACGATATTTTGACTGGTTATAATGATGCTTTT |
| | | | GATATTTGGGGCCAAGGGACAATGGTCACCGTCTCTT |
| | | | CA |
| 347 | 5538 | 1842 | QVQLVQSGAEVKKPGSSVKVSCKASGGRFSSDAISWVR |
| | | | QAPGQGLEWMGGIIPIRGTPTYAQKFQGRVTIIADESTTT |
| | | | SYMEMSSLRSEDTAVYYCARPNYDILTGYNDAFDIWGQ |
| | | | GTMVTVSS |
| 347 | 5539 | 1843 | GRFSSDAIS |
| 347 | 5540 | 1844 | GGCAGATTCAGCAGCGACGCTATCAGC |
| 347 | 5541 | 1845 | GIIPIRGTPTYAQKFQG |
| 347 | 5542 | 1846 | GGAATCATCCCTATCCGTGGGACACCAACCTACGCAC |
| | | | AGAAGTTCCAGGGC |
| 347 | 5543 | 1847 | ARPNYDILTGYNDAFDI |
| 347 | 5544 | 1848 | GCGAGACCGAATTACGATATTTTGACTGGTTATAATG |
| | | | ATGCTTTTGATATT |
| 347 | 5545 | 1849 | CAGTCTGTGTTGACGCAGCCTCGCTCAGTGTCCGGGTC |
| | | | TCCTGGACAGTCAGTCACCATCTCCTGCACTGGAACC |
| | | | AGCAGTGATGTTGGTGGTTATAACTATGTCTCCTGGTA |
| | | | CCAACAGCACCCAGGCAAAGTCCCCAGACTCATGATT |
| | | | TACGATGTCAGTAAGCGGCCCTCAGGGGCCCCTGATC |
| | | | GCTTCTCTGGCTCCAAGTCTGGCAACACGGCCTCCCTG |
| | | | ACCATCTCTGGGCTCCAGGCTGAGGATGAGGCTGATT |
| | | | ATTACTGCTGCTCATATGCAGGCGGCCTTTATGTCTTC |
| | | | GGAACTGGGACCAAGCTCACCGTCCTA |
| 347 | 5546 | 1850 | QSVLTQPRSVSGSPGQSVTISCTGTSSDVGGYNYVSWYQ |
| | | | QHPGKVPRLMIYDVSKRPSGAPDRFSGSKSGNTASLTISG |
| | | | LQAEDEADYYCCSYAGGLYVFGTGTKLTVL |
| 347 | 5547 | 1851 | TGTSSDVGGYNYVS |
| 347 | 5548 | 1852 | ACTGGAACCAGCAGTGATGTTGGTGGTTATAACTATG |
| | | | TCTCC |
| 347 | 5549 | 1853 | DVSKRPS |
| 347 | 5550 | 1854 | GATGTCAGTAAGCGGCCCTCA |
| 347 | 5551 | 1855 | CSYAGGLYV |
| 347 | 5552 | 1856 | TGCTCATATGCAGGCGGCCTTTATGTC |
| 348 | 5553 | 1857 | GAGGTGCAGCTGGTGGAGTCCGGGGCTGAGGTGAAG |
| | | | AAGCCTGGGGCCTCAGTGAAGGTCTCCTGCAAGGCTT |
| | | | CTGGATACACCTTCACCACTTATGATATCAACTGGGTG |
| | | | CGACAGGCCACTGGACGGGGGCTTGAGTGGATGGGAT |
| | | | GGATGACCCCTGATAGTGGTAGCACAGGCTATCCACA |
| | | | GAACTTCCAGGGCAGAGTCACCATGACCAGGAACACC |
| | | | TCCATAAGCACAGCCTACATGGAGTTGAGCAACCTGA |
| | | | GATCTGAGGACACGGCCGTATATTACTGTGTGCAAAT |
| | | | GGACCATTGTAGAAGTACCAGCTGCTCTGAGGGGAAC |
| | | | TGGTTCGACACCTGGGGCCAGGGAACCCTGGTCACCG |
| | | | TCTCCTCA |
| 348 | 5554 | 1858 | EVQLVESGAEVKKPGASVKVSCKASGYTFTTYDINWVR |
| | | | QATGRGLEWMGWMTPDSGSTGYPQNFQGRVTMTRNTS |
| | | | ISTAYMELSNLRSEDTAVYYCVQMDHCRSTSCSEGNWF |
| | | | DTWGQGTLVTVSS |
| 348 | 5555 | 1859 | YTFTTYDIN |
| 348 | 5556 | 1860 | TACACCTTCACCACTTATGATATCAAC |
| 348 | 5557 | 1861 | WMTPDSGSTGYPQNFQG |
| 348 | 5558 | 1862 | TGGATGACCCCTGATAGTGGTAGCACAGGCTATCCAC |
| | | | AGAACTTCCAGGGC |
| 348 | 5559 | 1863 | VQMDHCRSTSCSEGNWFDT |
| 348 | 5560 | 1864 | GTGCAAATGGACCATTGTAGAAGTACCAGCTGCTCTG |
| | | | AGGGGAACTGGTTCGACACC |
| 348 | 5561 | 1865 | CAGCCTGGGCTGACTCAGCCACCCTCGGTGTCTGCAG |
| | | | CCCCCAGGCAGAGGGTCACCATCTCCTGTTCTGGAAG |
| | | | CAGCTCCAACATCGGAACTAATGCTGTAAACTGGTAC |
| | | | CAGCAGCTCCCAGGAAAGGCTCCCAAACTCCTCATCT |
| | | | ATTCTGATAATCTGATGCCCTCAGGGGTCTCTGCCCGA |
| | | | TTCTCTGGCTCCAAGTCTGGCACCTCGGCCTCCCTGGC |
| | | | CATCAGTGGGCTCCAGTCTGAGGATGAGGCTGATTAT |
| | | | TACTGTGCAGCATGGGATGACAGCCTGAATGTTTGGG |
| | | | TGTTCGGCGGGGGGACCAAGCTCACCGTCCTA |
| 348 | 5562 | 1866 | QPGLTQPPSVSAAPRQRVTISCSGSSSNIGTNAVNWYQQ |
| | | | LPGKAPKLLIYSDNLMPSGVSARFSGSKSGTSASLAISGL |
| | | | QSEDEADYYCAAWDDSLNVWVFGGGTKLTVL |
| 348 | 5563 | 1867 | SGSSSNIGTNAVN |
| 348 | 5564 | 1868 | TCTGGAAGCAGCTCCAACATCGGAACTAATGCTGTAA |
| | | | AC |
| 348 | 5565 | 1869 | SDNLMPS |
| 348 | 5566 | 1870 | TCTGATAATCTGATGCCCTCA |
| 348 | 5567 | 1871 | AAWDDSLNVWV |
| 348 | 5568 | 1872 | GCAGCATGGGATGACAGCCTGAATGTTTGGGTG |
| 349 | 5569 | 1873 | GAGGTGCAGCTGGTGGAGTCTGGGGGAGGCTTGGTGA |
| | | | AGCCAGGGCGGTCCCTGAGACTCTCCTGTACAGCCTC |
| | | | TGGATTCAACTTCGGTGATTATGCTATGAGCTGGTTCC |
| | | | GCCAGGCTCCAGGGAAGGGGCTGGAGTGGGTAGGTTT |
| | | | CATTAGAAGCAAAACTTATCGTGAGACAAGAGAATAC |
| | | | GCCGCGTCTGTGAAAGGCAGATTCACCATGTCAAGAG |
| | | | ATGATTTCAACAGGATCGCCTATCTGCAAATGAACAG |
| | | | CCTGAAAACCGAGGACACAGCCATGTATTATTGTACG |
| | | | AGACAAGACGATTTTTGGAGTGGTCATCCCTACTACTT |
| | | | TGAGTACTGGGGCCAGGGAACCCTGGTCACCGTCTCC |
| | | | TCA |
| 349 | 5570 | 1874 | EVQLVESGGGLVKPGRSLRLSCTASGFNFGDYAMSWFR |
| | | | QAPGKGLEWVGFIRSKTYRETREYAASVKGRFTMSRDD |
| | | | FNRIAYLQMNSLKTEDTAMYYCTRQDDFWSGHPYYFEY |
| | | | WGQGTLVTVSS |
| 349 | 5571 | 1875 | FNFGDYAMS |
| 349 | 5572 | 1876 | TTCAACTTCGGTGATTATGCTATGAGC |
| 349 | 5573 | 1877 | FIRSKTYRETREYAASVKG |
| 349 | 5574 | 1878 | TTCATTAGAAGCAAAACTTATCGTGAGACAAGAGAAT |
| | | | ACGCCGCGTCTGTGAAAGGC |
| 349 | 5575 | 1879 | TRQDDFWSGHPYYFEY |
| 349 | 5576 | 1880 | ACGAGACAAGACGATTTTTGGAGTGGTCATCCCTACT |
| | | | ACTTTGAGTAC |
| 349 | 5577 | 1881 | CAGCCTGTGCTGACTCAGCCCCCCTCCGCGTCCGGGTC |
| | | | TCCTGGACAGTCAGTCACCATCTCCTGCACTGGAACC |
| | | | AACAGTGACGTGGGTAGTTATAACTATGTCTCCTGGT |
| | | | ACCAACATCACCCAGGCAAAGCCCCCAAACTCATCAT |
| | | | TTATGACGTCGCTAAGCGGCCCTCAGGGGTCCCTGAT |
| | | | CGCTTCTCTGGCTCCAAGTCTGGCAACACGGCCTCCCT |
| | | | GACCGTCTCTGGGCTCCAGGCTGAGGATGAGGCTGAT |
| | | | TATTACTGCAGCTCATATGCAGGCAGTAACGATTTGG |
| | | | GGGTCTTCGGAACTGGGACCAAGCTCACCGTCCTA |
| 349 | 5578 | 1882 | QPVLTQPPSASGSPGQSVTISCTGTNSDVGSYNYVSWYQ |
| | | | HHPGKAPKLIIYDVAKRPSGVPDRFSGSKSGNTASLTVS |
| | | | GLQAEDEADYYCSSYAGSNDLGVFGTGTKLTVL |
| 349 | 5579 | 1883 | TGTNSDVGSYNYVS |
| 349 | 5580 | 1884 | ACTGGAACCAACAGTGACGTGGGTAGTTATAACTATG |
| | | | TCTCC |
| 349 | 5581 | 1885 | DVAKRPS |
| 349 | 5582 | 1886 | GACGTCGCTAAGCGGCCCTCA |
| 349 | 5583 | 1887 | SSYAGSNDLGV |
| 349 | 5584 | 1888 | AGCTCATATGCAGGCAGTAACGATTTGGGGGTC |
| 350 | 5585 | 1889 | GAGGTGCAGCTGGTGGAGTCCGGCCCAGGACTGGTGA |
| | | | AGCCTTCGGAGACCCTGTCCCTCACCTGCACTGTGTCT |
| | | | GGTGGCTCCGTCAGTGGTCACTACTGGAGCTGGATTC |
| | | | GGCAGTTCCCAGGGAAGGAACTGGAATGGATTGGTCA |
| | | | TATCTATTATATTGGGACGACCAACTACAACCCCTCCC |
| | | | TCAAGAGTCGAGTCATCATATCGCTAGACACGTCCAA |
| | | | GAATCAGCTCTCCCTGAAGCTGAGTTCTGTGACCGCT |
| | | | GCGGACACTGCCGTTTATTATTGTGCCAGACAGTTCG |
| | | | GCTATGATAAAAATACTTTAAGTCGGCTTGACTTTGAC |
| | | | TACTGGGGCCAGGGAACCCTGGTCACCGTCTCCTCA |
| 350 | 5586 | 1890 | EVQLVESGPGLVKPSETLSLTCTVSGGSVSGHYWSWIRQ |
| | | | FPGKELEWIGHIYYIGTTNYNPSLKSRVIISLDTSKNQLSL |
| | | | KLSSVTAADTAVYYCARQFGYDKNTLSRLDFDYWGQG |
| | | | TLVTVSS |
| 350 | 5587 | 1891 | GSVSGHYWS |
| 350 | 5588 | 1892 | GGCTCCGTCAGTGGTCACTACTGGAGC |
| 350 | 5589 | 1893 | HIYYIGTTNYNPSLKS |
| 350 | 5590 | 1894 | CATATCTATTATATTGGGACGACCAACTACAACCCCTC |
| | | | CCTCAAGAGT |
| 350 | 5591 | 1895 | ARQFGYDKNTLSRLDFDY |
| 350 | 5592 | 1896 | GCCAGACAGTTCGGCTATGATAAAAATACTTTAAGTC |
| | | | GGCTTGACTTTGACTAC |
| 350 | 5593 | 1897 | GACATCCAGATGACCCAGTCTCCATCCTCCCTGTCTGC |
| | | | ATCTGTAAGAGACAGAGTCACCATCACTTGCCGGGCA |
| | | | AGTCAGAGCATTAGCAGCTATTTAAATTGGTATCAAC |
| | | | AGAGACCAGGGAAAGCCCCTAAGCTCCTGATCTATTC |
| | | | TGCATTCAGTTTACATAGTGGTGTCCCATCAAGGTTCA |
| | | | GTGGCAGTGGATCTGAGACAGAGTTCACTCTCACCAT |
| | | | CAGCAGTCTGCAACCTGACGATTTTGCAACTTATTACT |
| | | | GTCAACAGAGTTACAGTATTCCCTGGACGTTCGGCCA |
| | | | AGGGACCAAGGTGGAAATCAAA |
| 350 | 5594 | 1898 | DIQMTQSPSSLSASVRDRVTITCRASQSISSYLNWYQQRP |
| | | | GKAPKLLIYSAFSLHSGVPSRFSGSGSETEFTLTISSLQPD |
| | | | DFATYYCQQSYSIPWTFGQGTKVEIK |
| 350 | 5595 | 1899 | RASQSISSYLN |
| 350 | 5596 | 1900 | CGGGCAAGTCAGAGCATTAGCAGCTATTTAAAT |
| 350 | 5597 | 1901 | SAFSLHS |
| 350 | 5598 | 1902 | TCTGCATTCAGTTTACATAGT |
| 350 | 5599 | 1903 | QQSYSIPWT |
| 350 | 5600 | 1904 | CAACAGAGTTACAGTATTCCCTGGACG |
| 351 | 5601 | 1905 | CAGGTGCAGCTGCAGGAGTCCGGCCCGGGACTGGTGA |
| | | | AGCCTTCGGAGACCCTGTCCCTCACCTGCAGTGTCTCT |
| | | | GGTGGCTCCATCACCAATGTTAATTACTACTGGGGCT |
| | | | GGATCCGCCAGCCCCCCGGGAAGGGCCTGGAGTGGAT |
| | | | TGGGAGTATCTATTATAATGGAAACACCTACTACAAC |
| | | | CCGTCCCTCCAGAGTCGAGTCACCATGTCCGTGGACA |
| | | | CGTCCAAGAACCACTTCTCCCTGAGGCTGACGTCTGT |
| | | | GACCGCCGCAGACACGGCTGTATATTTTTGTGCGAGA |
| | | | GAGGGGCCTAATTGGGAATTGTTGAATGCTTTCGATA |
| | | | TCTGGGGCCAAGGGACCACGGTCACCGTCTCCTCA |
| 351 | 5602 | 1906 | QVQLQESGPGLVKPSETLSLTCSVSGGSITNVNYYWGWI |
| | | | RQPPGKGLEWIGSIYYNGNTYYNPSLQSRVTMSVDTSKN |
| | | | HFSLRLTSVTAADTAVYFCAREGPNWELLNAFDIWGQG |
| | | | TTVTVSS |
| 351 | 5603 | 1907 | GSITNVNYYWG |
| 351 | 5604 | 1908 | GGCTCCATCACCAATGTTAATTACTACTGGGGC |
| 351 | 5605 | 1909 | SIYYNGNTYYNPSLQS |
| 351 | 5606 | 1910 | AGTATCTATTATAATGGAAACACCTACTACAACCCGT |
| | | | CCCTCCAGAGT |
| 351 | 5607 | 1911 | AREGPNWELLNAFDI |
| 351 | 5608 | 1912 | GCGAGAGAGGGGCCTAATTGGGAATTGTTGAATGCTT |
| | | | TCGATATC |
| 351 | 5609 | 1913 | TCCTATGAGCTGACTCAGCCACCCTCGGTGTCAGTGG |
| | | | CCCCAGGACAGACGGCCAGGATTACCTGTGGGGGAA |
| | | | ACAACATTGGAAGTAAAAATGTGCACTGGTACCAGCA |
| | | | GAAGCCAGGCCAGGCCCCTGTCTTGGTCGTCTATGAG |
| | | | GATACCCACCGGCCCTCAGGGATCCCTGAGCGATTCT |
| | | | CTGGCTCCAACTCTGGGAACACGGCCACCCTGACCAT |
| | | | CAGTAGGGTCGAAGCCGGGGATGAGGCCGACTATTAC |
| | | | TGTCAGGTGTGGGATACTAGTAGTGATCATGTGGTAT |
| | | | TCGGCGGAGGGACCAAGCTGACCGTCCTC |
| 351 | 5610 | 1914 | SYELTQPPSVSVAPGQTARITCGGNNIGSKNVHWYQQKP |
| | | | GQAPVLVVYEDTHRPSGIPERFSGSNSGNTATLTISRVEA |
| | | | GDEADYYCQVWDTSSDHVVFGGGTKLTVL |
| 351 | 5611 | 1915 | GGNNIGSKNVH |
| 351 | 5612 | 1916 | GGGGGAAACAACATTGGAAGTAAAAATGTGCAC |
| 351 | 5613 | 1917 | EDTHRPS |
| 351 | 5614 | 1918 | GAGGATACCCACCGGCCCTCA |
| 351 | 5615 | 1919 | QVWDTSSDHVV |
| 351 | 5616 | 1920 | CAGGTGTGGGATACTAGTAGTGATCATGTGGTA |
| 352 | 5617 | 1921 | CAGGTCCAGCTTGTGCAGTCTGGGGCTGAGGTGAAGA |
| | | | AGCCTGGGGCCTCAGTGAAGGTCTCCTGCAAGACTTC |
| | | | TGGTTACACCTTTAGTCATTTCGGTGTCACCTGGATAC |
| | | | GACAGGCCCCAGGACAAGGGCTTGAGTGGCTGGGAT |
| | | | GGATCAGCGCTTACAATGGTAACACAGACTCTGCAGA |
| | | | CAAACTGCAGGGCAGACTCACCATGACGACAGACAC |
| | | | ATCCACGAACACCGCCTACATGGAGTTGAGGAGCCTC |
| | | | AGATCTGACGACACGGCCGTCTATTACTGTGCGAGAG |
| | | | ATCCCCCCGCATCAGCTGCTGCCATGCTTGACTACTGG |
| | | | GGCCAGGGAACCCTGGTCACCGTCTCCTCA |
| 352 | 5618 | 1922 | QVQLVQSGAEVKKPGASVKVSCKTSGYTFSHFGVTWIR |
| | | | QAPGQGLEWLGWISAYNGNTDSADKLQGRLTMTTDTS |
| | | | TNTAYMELRSLRSDDTAVYYCARDPPASAAAMLDYWG |
| | | | QGTLVTVSS |
| 352 | 5619 | 1923 | YTFSHFGVT |
| 352 | 5620 | 1924 | TACACCTTTAGTCATTTCGGTGTCACC |
| 352 | 5621 | 1925 | WISAYNGNTDSADKLQG |
| 352 | 5622 | 1926 | TGGATCAGCGCTTACAATGGTAACACAGACTCTGCAG |
| | | | ACAAACTGCAGGGC |
| 352 | 5623 | 1927 | ARDPPASAAAMLDY |
| 352 | 5624 | 1928 | GCGAGAGATCCCCCCGCATCAGCTGCTGCCATGCTTG |
| | | | ACTAC |
| 352 | 5625 | 1929 | GACATCCAGATGACCCAGTCTCCACTCTCCCTGGCCGT |
| | | | CACCCTTGGACAGCCGGCCTCCATCTCCTGCAGGTCTA |
| | | | GTCAAGGCCTCGAATACACTGATGGAAACACCTACTT |
| | | | GAGTTGGTTTCAGCAGAGGCCAGGCCAATCTCCAAGG |
| | | | CGCCTCATTTATAAGGTTTCTAATCGGGACTCTGGGGT |
| | | | CCCAGACAGATTCAGCGGCAGCGGGGCAGGCACTGAT |
| | | | TTCACACTGAGAATCAGCAGGGTGGAGGCTGAGGATG |
| | | | TTGGGGTTTATTACTGCATGCAAGGTACACACGGGCG |
| | | | GGGAATCTCTTTCGGTCCTGGGACCAAAGTGGATATC |
| | | | AAA |
| 352 | 5626 | 1930 | DIQMTQSPLSLAVTLGQPASISCRSSQGLEYTDGNTYLS |
| | | | WFQQRPGQSPRRLIYKVSNRDSGVPDRFSGSGAGTDFTL |
| | | | RISRVEAEDVGVYYCMQGTHGRGISFGPGTKVDIK |
| 352 | 5627 | 1931 | RSSQGLEYTDGNTYLS |
| 352 | 5628 | 1932 | AGGTCTAGTCAAGGCCTCGAATACACTGATGGAAACA |
| | | | CCTACTTGAGT |
| 352 | 5629 | 1933 | KVSNRDS |
| 352 | 5630 | 1934 | AAGGTTTCTAATCGGGACTCT |
| 352 | 5631 | 1935 | MQGTHGRGIS |
| 352 | 5632 | 1936 | ATGCAAGGTACACACGGGCGGGGAATCTCT |
| 353 | 5633 | 1937 | CAGGTGCAGCTGGTGCAGTCTGGGGCTGAGGTGAAGA |
| | | | AGCCTGGGGCCTCAGTGAGGGTCTCCTGCAAGGCCTC |
| | | | TGGATACACCTTCACCGACTACTTTATGAACTGGGTGC |
| | | | GACAGGCCCCTGGAGGGGGCCTTGAGTGGATGGGGTG |
| | | | GATCAATCCTCTCAGTGGAGTCACAAAATATGCACAG |
| | | | CAGTTTCAGGGCAGTGTCACCATGACCACTGACACGT |
| | | | CCATCACCACAGGCTACATGGAGCTGAGGAGCCTGAG |
| | | | AGTTGACGACACGGCCGTCTATTATTGTGCGAGCCAG |
| | | | TCTTCCCCTTACACCCCGGGCGCCATGGGCGTCTGGG |
| | | | GCCAAGGGACCACGGTCACCGTCTCCTCA |
| 353 | 5634 | 1938 | QVQLVQSGAEVKKPGASVRVSCKASGYTFTDYFMNWV |
| | | | RQAPGGGLEWMGWINPLSGVTKYAQQFQGSVTMTTDT |
| | | | SITTGYMELRSLRVDDTAVYYCASQSSPYTPGAMGVWG |
| | | | QGTTVTVSS |
| 353 | 5635 | 1939 | YTFTDYFMN |
| 353 | 5636 | 1940 | TACACCTTCACCGACTACTTTATGAAC |
| 353 | 5637 | 1941 | WINPLSGVTKYAQQFQG |
| 353 | 5638 | 1942 | TGGATCAATCCTCTCAGTGGAGTCACAAAATATGCAC |
| | | | AGCAGTTTCAGGGC |
| 353 | 5639 | 1943 | ASQSSPYTPGAMGV |
| 353 | 5640 | 1944 | GCGAGCCAGTCTTCCCCTTACACCCCGGGCGCCATGG |
| | | | GCGTC |
| 353 | 5641 | 1945 | GACATCCGGATGACCCAGTCTCCATCCTCCCTGTCTGC |
| | | | ATCTGTAGGAGACAGAGTCACCATCACTTGCCGGACA |
| | | | AGTCAGAGCGTTAGCGGCTATTTAAGTTGGTATCAGC |
| | | | AGAAACCAGGGAAAGCCCCTAAGCTCCTGATCTATGC |
| | | | GGCATCCAATTTGTACAGTGGGGTCCCATCAAGGTTC |
| | | | AGTGGCAGTGGATCTGGGACAGATTTCACTCTCACCA |
| | | | TCACCAGTCTGCAACCTGAAGATTTTGCAACTTACTTC |
| | | | TGTCAACTGAATTCCGGTGCCCTATTCACTTTCGGCCC |
| | | | TGGGACCAAGGTGGAAATCAAA |
| 353 | 5642 | 1946 | DIRMTQSPSSLSASVGDRVTITCRTSQSVSGYLSWYQQK |
| | | | PGKAPKLLIYAASNLYSGVPSRFSGSGSGTDFTLTITSLQP |
| | | | EDFATYFCQLNSGALFTFGPGTKVEIK |
| 353 | 5643 | 1947 | RTSQSVSGYLS |
| 353 | 5644 | 1948 | CGGACAAGTCAGAGCGTTAGCGGCTATTTAAGT |
| 353 | 5645 | 1949 | AASNLYS |
| 353 | 5646 | 1950 | GCGGCATCCAATTTGTACAGT |
| 353 | 5647 | 1951 | QLNSGALFT |
| 353 | 5648 | 1952 | CAACTGAATTCCGGTGCCCTATTCACT |
| 354 | 5649 | 1953 | GAGGTGCAGCTGGTGGAGTCTGGGGGAGGCTTGGTCA |
| | | | AGCCTGGAGAGTCCGTGAAACTCTCCTGCGCAGCGTC |
| | | | TGGATTCACCATCACTGACTCCTACATGGCCTGGATCC |
| | | | GCCAGTCTCCAGGGAAGGGGCTGGAGTGGCTTGCTTA |
| | | | CATTAGTAGTACTAGTCTTTTCACAGACTACACAGACT |
| | | | CTGTGAAGGGCCGATTCATCATCACCAGAGACAATGC |
| | | | CGAGAACTCACTCTATCTGCAAATGACCAGCCTGACA |
| | | | CCGGCAGACACGGGTGTCTATTTCTGTGCGAGGGCCA |
| | | | AAACATCCTACTACTTCTACGCTCTGGACGTCTGGGGC |
| | | | CCAGGCACCCTGGTCACCGTCTCCTCA |
| 354 | 5650 | 1954 | EVQLVESGGGLVKPGESVKLSCAASGFTITDSYMAWIRQ |
| | | | SPGKGLEWLAYISSTSLFTDYTDSVKGRFIITRDNAENSL |
| | | | YLQMTSLTPADTGVYFCARAKTSYYFYALDVWGPGTL |
| | | | VTVSS |
| 354 | 5651 | 1955 | FTITDSYMA |
| 354 | 5652 | 1956 | TTCACCATCACTGACTCCTACATGGCC |
| 354 | 5653 | 1957 | YISSTSLFTDYTDSVKG |
| 354 | 5654 | 1958 | TACATTAGTAGTACTAGTCTTTTCACAGACTACACAGA |
| | | | CTCTGTGAAGGGC |
| 354 | 5655 | 1959 | ARAKTSYYFYALDV |
| 354 | 5656 | 1960 | GCGAGGGCCAAAACATCCTACTACTTCTACGCTCTGG |
| | | | ACGTC |
| 354 | 5657 | 1961 | GAAACGACACTCACGCAGTCTCCAGGCACGCTGTCTT |
| | | | TGTCTCCGGGGGAAAGAGCCACCCTCTCCTGCAGGGC |
| | | | CAGTCAGAGTGTTAACAACAACTATCTAGCCTGGTTC |
| | | | CAGCACAAACCTGGCCAGGCTCCCAGACTCCTCATCT |
| | | | ATAATGCATCCAACAGGGCCGCTGGCATCCCAGACAG |
| | | | GTTCAGTGGTAGTGGGTCTGGGACAGACTTCACTCTC |
| | | | ACCATCAGCAAACTGGAGCCTGGAGATTCTGCAGTGT |
| | | | ATTACTGTCAGCGATATGGGAACTCTTGGCCGTTCGG |
| | | | CCAAGGGACCAAGGTGGAAATCAAA |
| 354 | 5658 | 1962 | ETTLTQSPGTLSLSPGERATLSCRASQSVNNNYLAWFQH |
| | | | KPGQAPRLLIYNASNRAAGIPDRFSGSGSGTDFTLTISKL |
| | | | EPGDSAVYYCQRYGNSWPFGQGTKVEIK |
| 354 | 5659 | 1963 | RASQSVNNNYLA |
| 354 | 5660 | 1964 | AGGGCCAGTCAGAGTGTTAACAACAACTATCTAGCC |
| 354 | 5661 | 1965 | NASNRAA |
| 354 | 5662 | 1966 | AATGCATCCAACAGGGCCGCT |
| 354 | 5663 | 1967 | QRYGNSWP |
| 354 | 5664 | 1968 | CAGCGATATGGGAACTCTTGGCCG |
| 355 | 5665 | 1969 | CAGGTCCAGCTGGTGCAGTCTGGGGGAGGCTTGGTAC |
| | | | AGCCTGGGGGGTCCCTGAGACTCTCCTGTGCAGCCTC |
| | | | TGGATTCACCTTTAGTCAGTCTCCCATGAGCTGGGTCC |
| | | | GCCAGGCTCCTGGGAAGGGGCTGGAGTGGGTCTCCGG |
| | | | TATTAGTACTGGAGGGACCAATACATACTACGCAGAC |
| | | | TCCGTGAAGGGCCGCTTCACCATCTCCAGAGACAATT |
| | | | CCAAGAACACGTTGTATCTGCAAATGACCAGCCTGAG |
| | | | AGTCGGGGACACGGCCGTGTATTACTGTGCGAAAGAG |
| | | | AGTTTAGACTTTGGTTCAGGGAGCTACAACTGGTTCG |
| | | | ACACCTGGGGCCAGGGAACCCTGGTCACTGTCTCCTC |
| | | | A |
| 355 | 5666 | 1970 | QVQLVQSGGGLVQPGGSLRLSCAASGFTFSQSPMSWVR |
| | | | QAPGKGLEWVSGISTGGTNTYYADSVKGRFTISRDNSKN |
| | | | TLYLQMTSLRVGDTAVYYCAKESLDFGSGSYNWFDTW |
| | | | GQGTLVTVSS |
| 355 | 5667 | 1971 | FTFSQSPMS |
| 355 | 5668 | 1972 | TTCACCTTTAGTCAGTCTCCCATGAGC |
| 355 | 5669 | 1973 | GISTGGTNTYYADSVKG |
| 355 | 5670 | 1974 | GGTATTAGTACTGGAGGGACCAATACATACTACGCAG |
| | | | ACTCCGTGAAGGGC |
| 355 | 5671 | 1975 | AKESLDFGSGSYNWFDT |
| 355 | 5672 | 1976 | GCGAAAGAGAGTTTAGACTTTGGTTCAGGGAGCTACA |
| | | | ACTGGTTCGACACC |
| 355 | 5673 | 1977 | GAAATTGTATTGACGCAGTCTCCAGACTCCCTGGCTGT |
| | | | GTCTCTGGGCGAGAGGGCCACCATCAACTGCAAGTCC |
| | | | AGCCAGAGTGTTTTATACAGGTCCAACAATAAGAACT |
| | | | ACTTAGCTTGGTACCAGCAGAGACCAGGACAGCCTCC |
| | | | TAGGCTGCTCATTTCCTGGGCATCTACCCGGGAATCCG |
| | | | GGGTCCCTGACCGATTCACTGGCAGCGGGTCTGGGAC |
| | | | AGATTTCACTCTCACCATCAGCAGCCTGCAGGCTGAA |
| | | | GATGTGGCAGTTTATTACTGTCACCAATATTATGATAC |
| | | | CCACACTTTTGGCCAGGGGACCAAAGTGGATATCAAA |
| 355 | 5674 | 1978 | EIVLTQSPDSLAVSLGERATINCKSSQSVLYRSNNKNYLA |
| | | | WYQQRPGQPPRLLISWASTRESGVPDRFTGSGSGTDFTL |
| | | | TISSLQAEDVAVYYCHQYYDTHTFGQGTKVDIK |
| 355 | 5675 | 1979 | KSSQSVLYRSNNKNYLA |
| 355 | 5676 | 1980 | AAGTCCAGCCAGAGTGTTTTATACAGGTCCAACAATA |
| | | | AGAACTACTTAGCT |
| 355 | 5677 | 1981 | WASTRES |
| 355 | 5678 | 1982 | TGGGCATCTACCCGGGAATCC |
| 355 | 5679 | 1983 | HQYYDTHT |
| 355 | 5680 | 1984 | CACCAATATTATGATACCCACACT |
| 356 | 5681 | 1985 | GAGGTGCAGCTGGTGGAGTCTGGGGGAGGCGTGGTCC |
| | | | AGCCTGGGAGGTCCCTGAGACTCTCCTGTGTAGCCTCT |
| | | | GGATTCAGCTTCAGTGCCTATGGCATGCACTGGGTTC |
| | | | GCCAGGTTCCAACCAAGGGGCTGGAGTGGGTGGCTGT |
| | | | TATATCATATGATGGAAGAGATATATACTATACAGAC |
| | | | TCCGTGAAGGGCCGATTCACCATTTCCAGAGACAATT |
| | | | CCAAGAACATGTTGTATCTGCAAATGAACAGCCTGAG |
| | | | ACCTGAGGACAGGGCTGTCTATTACTGTGCGAGAGAT |
| | | | CCGTCCCTCGGTTATAATAATCACTACTTTGACTATTG |
| | | | GGGCCAGGGAACCCTGGTCACCGTCTCTTCA |
| 356 | 5682 | 1986 | EVQLVESGGGVVQPGRSLRLSCVASGFSFSAYGMHWVR |
| | | | QVPTKGLEWVAVISYDGRDIYYTDSVKGRFTISRDNSKN |
| | | | MLYLQMNSLRPEDRAVYYCARDPSLGYNNHYFDYWGQ |
| | | | GTLVTVSS |
| 356 | 5683 | 1987 | FSFSAYGMH |
| 356 | 5684 | 1988 | TTCAGCTTCAGTGCCTATGGCATGCAC |
| 356 | 5685 | 1989 | VISYDGRDIYYTDSVKG |
| 356 | 5686 | 1990 | GTTATATCATATGATGGAAGAGATATATACTATACAG |
| | | | ACTCCGTGAAGGGC |
| 356 | 5687 | 1991 | ARDPSLGYNNHYFDY |
| 356 | 5688 | 1992 | GCGAGAGATCCGTCCCTCGGTTATAATAATCACTACTT |
| | | | TGACTAT |
| 356 | 5689 | 1993 | GAAATTGTGTTGACGCAGTCTCCAGCCACCCTGTCTTT |
| | | | GTCTCCAGGGGAAACAGCCACCCTCTCCTGCAGGGCC |
| | | | AGTCAGAGTGTTACCGGCAACTTAGCCTGGTACCAAC |
| | | | AGAAACCTGGCCAGGCTCCCAGGCTCCTCATCTATGC |
| | | | TGCATCCAACAGGGCCACTGGCATCCCAGCCAGGTTC |
| | | | AGTGGCAGTGGGTCTGGGACAGACTTCACTCTCACCA |
| | | | TCAGCAGCCTAGAGCCTGAAGATTTTGCAGTTTATTTC |
| | | | TGTCAGCAGCGTAGCAACTGGCCTCCTATGTACAGTTT |
| | | | TGGCCAGGGGACCAAGCTGGAGATCAAA |
| 356 | 5690 | 1994 | EIVLTQSPATLSLSPGETATLSCRASQSVTGNLAWYQQK |
| | | | PGQAPRLLIYAASNRATGIPARFSGSGSGTDFTLTISSLEP |
| | | | EDFAVYFCQQRSNWPPMYSFGQGTKLEIK |
| 356 | 5691 | 1995 | RASQSVTGNLA |
| 356 | 5692 | 1996 | AGGGCCAGTCAGAGTGTTACCGGCAACTTAGCC |
| 356 | 5693 | 1997 | AASNRAT |
| 356 | 5694 | 1998 | GCTGCATCCAACAGGGCCACT |
| 356 | 5695 | 1999 | QQRSNWPPMYS |
| 356 | 5696 | 2000 | CAGCAGCGTAGCAACTGGCCTCCTATGTACAGT |
| 357 | 5697 | 2001 | CAGGTCCAGCTTGTACAGTCTGGGGCTGAGGTGAAGA |
| | | | GGCCTGGGTCCTCGGTGAAGGTCTCCTGCAAGGCCTC |
| | | | TGGAGGCACCTTCAGAGGCTACCATATCAGCTGGGTG |
| | | | CGACAGGCCCCTGGACAAGGGCTCGAGTGGATGGGA |
| | | | GGGATCATCCATCTATTTGGGACAGTAAGCTACGCTC |
| | | | CGAAGTTCCAGGGCAGAGTCACGATCACCGCGGACGC |
| | | | ATCCACGGGCACAGCCCATATGGAGTTGAGCAGCCTG |
| | | | ACATCTGACGACACGGCCATATACTATTGTGCGAGAG |
| | | | ATGCTTACGAAGTCTGGACGGGTTCTTATCTCCCCCCT |
| | | | TTTGACTACTGGGGCCAGGGAACCCTGGTCACCGTCT |
| | | | CCTCA |
| 357 | 5698 | 2002 | QVQLVQSGAEVKRPGSSVKVSCKASGGTFRGYHISWVR |
| | | | QAPGQGLEWMGGIIHLFGTVSYAPKFQGRVTITADASTG |
| | | | TAHMELSSLTSDDTAIYYCARDAYEVWTGSYLPPFDYW |
| | | | GQGTLVTVSS |
| 357 | 5699 | 2003 | GTFRGYHIS |
| 357 | 5700 | 2004 | GGCACCTTCAGAGGCTACCATATCAGC |
| 357 | 5701 | 2005 | GIIHLFGTVSYAPKFQG |
| 357 | 5702 | 2006 | GGGATCATCCATCTATTTGGGACAGTAAGCTACGCTC |
| | | | CGAAGTTCCAGGGC |
| 357 | 5703 | 2007 | ARDAYEVWTGSYLPPFDY |
| 357 | 5704 | 2008 | GCGAGAGATGCTTACGAAGTCTGGACGGGTTCTTATC |
| | | | TCCCCCCTTTTGACTAC |
| 357 | 5705 | 2009 | GATATTGTGATGACTCAGACTCCAGGCACCCTGTCTTT |
| | | | GTCTCCCGGGGAAAGAGTCACCCTCTCCTGCAGGGCC |
| | | | AGTCAGACTGTTACAAGCAGCTACTTAGCCTGGTACC |
| | | | AGCAGAAACCTGGCCAGGCTCCCAGACTCCTCATCTA |
| | | | TGGTGCATTCACCAGGGCCACTGGCATCCCAGACAGG |
| | | | TTCAGTGGTAGTGGGTCTGGGACAGACTTCACTCTCA |
| | | | CCATCAGCAGACTGGAGCCTGAAGATTTTGCAGTATA |
| | | | TTACTGTCAGCAGTATGGTAGCTCATTCCTCACTTTCG |
| | | | GCGGAGGGACCAAGCTGGAGATCAAA |
| 357 | 5706 | 2010 | DIVMTQTPGTLSLSPGERVTLSCRASQTVTSSYLAWYQQ |
| | | | KPGQAPRLLIYGAFTRATGIPDRFSGSGSGTDFTLTISRLE |
| | | | PEDFAVYYCQQYGSSFLTFGGGTKLEIK |
| 357 | 5707 | 2011 | RASQTVTSSYLA |
| 357 | 5708 | 2012 | AGGGCCAGTCAGACTGTTACAAGCAGCTACTTAGCC |
| 357 | 5709 | 2013 | GAFTRAT |
| 357 | 5710 | 2014 | GGTGCATTCACCAGGGCCACT |
| 357 | 5711 | 2015 | QQYGSSFLT |
| 357 | 5712 | 2016 | CAGCAGTATGGTAGCTCATTCCTCACT |
| 358 | 5713 | 2017 | GAGGTGCAGCTGGTGGAGTCTGGGGGAGGCCTGGTCA |
| | | | AGCCTGGGGGGTCCCTGAGACTCTCCTGTGCAGCCTC |
| | | | TGGATTCACCTTCAGTAGCTATAGCATGAACTGGGTC |
| | | | CGCCAGGCTCCAGGGAAGGGGCTGGAGTGGGTCTCAT |
| | | | CCATTAGTAGTAGTAGTAGTTACATATACTACGCAGA |
| | | | CTCAGTGAAGGGCCGATTCACCATCTCCAGAGACAAC |
| | | | GCCAAGAACTCACTGTATCTGCAAATGAACAGCCTGA |
| | | | GAGCCGAGGACACGGCTGTGTATTACTGTGCGAGAGA |
| | | | TGTGCAATATAGTGGCTACGATTCTGGGTACTACTTTG |
| | | | ACTACTGGGGCCAGGGAACCCTGGTCACTGTCTCCTC |
| | | | A |
| 358 | 5714 | 2018 | EVQLVESGGGLVKPGGSLRLSCAASGFTFSSYSMNWVR |
| | | | QAPGKGLEWVSSISSSSSYIYYADSVKGRFTISRDNAKNS |
| | | | LYLQMNSLRAEDTAVYYCARDVQYSGYDSGYYFDYW |
| | | | GQGTLVTVSS |
| 358 | 5715 | 2019 | FTFSSYSMN |
| 358 | 5716 | 2020 | TTCACCTTCAGTAGCTATAGCATGAAC |
| 358 | 5717 | 2021 | SISSSSSYIYYADSVKG |
| 358 | 5718 | 2022 | TCCATTAGTAGTAGTAGTAGTTACATATACTACGCAG |
| | | | ACTCAGTGAAGGGC |
| 358 | 5719 | 2023 | ARDVQYSGYDSGYYFDY |
| 358 | 5720 | 2024 | GCGAGAGATGTGCAATATAGTGGCTACGATTCTGGGT |
| | | | ACTACTTTGACTAC |
| 358 | 5721 | 2025 | CAGCCTGTGCTGACTCAGCCACCCTCAGTGTCTGGGG |
| | | | CCCCAGGACAGAGGGTCACCATCTCCTGCACTGGGAG |
| | | | CAGCTCCAACATCGGGGCAGGTTATGATGTACACTGG |
| | | | TACCAGCAGCTTCCAGGAACAGCCCCCAAACTCCTCA |
| | | | TCTATGGTAACAGCAATCGGCCCTCAGGGGTCCCTGA |
| | | | CCGATTCTCTGGCTCCAAGTCTGGCACCTCAGCCTCCC |
| | | | TGGCCATCACTGGGCTCCAGGCTGAGGATGAGGCTGA |
| | | | TTATTACTGCCAGTCCTATGACAGCAGCCTGAGTGCCC |
| | | | TTTATGTCTTCGGAACTGGGACCAAGGTGACCGTCCT |
| | | | A |
| 358 | 5722 | 2026 | QPVLTQPPSVSGAPGQRVTISCTGSSSNIGAGYDVHWYQ |
| | | | QLPGTAPKLLIYGNSNRPSGVPDRFSGSKSGTSASLAITG |
| | | | LQAEDEADYYCQSYDSSLSALYVFGTGTKVTVL |
| 358 | 5723 | 2027 | TGSSSNIGAGYDVH |
| 358 | 5724 | 2028 | ACTGGGAGCAGCTCCAACATCGGGGCAGGTTATGATG |
| | | | TACAC |
| 358 | 5725 | 2029 | GNSNRPS |
| 358 | 5726 | 2030 | GGTAACAGCAATCGGCCCTCA |
| 358 | 5727 | 2031 | QSYDSSLSALYV |
| 358 | 5728 | 2032 | CAGTCCTATGACAGCAGCCTGAGTGCCCTTTATGTC |
| 359 | 5729 | 2033 | GAGGTGCAGCTGGTGGAGTCTGGGGGAGGCGTGGTCC |
| | | | AGCCGGGGGGGTCCCTGAGACTCTCCTGTGCAGGCTC |
| | | | TGGATTCGCCTTCGGTAGCTTCGCGATGCACTGGGTCC |
| | | | GTCAGGCTCCAGGCAAGGGGCTGGAGTGGGTGGCTGT |
| | | | TATTTCATTTGACGGAAAGAATACAAAATATGCTGAC |
| | | | TCCGTGAAGGGCCGATTCACCACCTCCAGAGACAATT |
| | | | CCAGGAACACGCTCTATCTCCAAATGGACAGCCTGAG |
| | | | AGGTGACGACACGGCTATATATTACTGCGCGACAATT |
| | | | AGGGGAATTGTGGCTGGCCTTTGTGACAACTGGGGCC |
| | | | AGGGAACCCTGGTCACCGTCTCCTCA |
| 359 | 5730 | 2034 | EVQLVESGGGVVQPGGSLRLSCAGSGFAFGSFAMHWVR |
| | | | QAPGKGLEWVAVISFDGKNTKYADSVKGRFTTSRDNSR |
| | | | NTLYLQMDSLRGDDTAIYYCATIRGIVAGLCDNWGQGT |
| | | | LVTVSS |
| 359 | 5731 | 2035 | FAFGSFAMH |
| 359 | 5732 | 2036 | TTCGCCTTCGGTAGCTTCGCGATGCAC |
| 359 | 5733 | 2037 | VISFDGKNTKYADSVKG |
| 359 | 5734 | 2038 | GTTATTTCATTTGACGGAAAGAATACAAAATATGCTG |
| | | | ACTCCGTGAAGGGC |
| 359 | 5735 | 2039 | ATIRGIVAGLCDN |
| 359 | 5736 | 2040 | GCGACAATTAGGGGAATTGTGGCTGGCCTTTGTGACA |
| | | | AC |
| 359 | 5737 | 2041 | CAGCCTGTGCTGACTCAATCATCGTCTGACTCTGCTTC |
| | | | CCTGGGAGCCTCGGTCAAGCTCACCTGTACTCTGAGC |
| | | | AGTGGCCACAGAAACTACATCATCGCATGGCATCAAC |
| | | | AACAACCAGGGAAGGCCCCTCGGTTCCTGATGAAGGT |
| | | | TGAAGGTAGTGGAAGCTTCACCATGGGGAGCGGAGTT |
| | | | CCTGATCGCTTCTCGGGCTCCAGCTCTGGGGCTGACCG |
| | | | CTACCTCACCATCTCCAACCTCCAGTCTGAGGATGAG |
| | | | GCTGATTATTACTGTGAGGCCTGGGACTTTAACACGG |
| | | | GGGGGGTCTTCGGCGGAGGCACCCAGCTGACCGTCCT |
| | | | C |
| 359 | 5738 | 2042 | QPVLTQSSSDSASLGASVKLTCTLSSGHRNYIIAWHQQQ |
| | | | PGKAPRFLMKVEGSGSFTMGSGVPDRFSGSSSGADRYLT |
| | | | ISNLQSEDEADYYCEAWDFNTGGVFGGGTQLTVL |
| 359 | 5739 | 2043 | TLSSGHRNYIIA |
| 359 | 5740 | 2044 | ACTCTGAGCAGTGGCCACAGAAACTACATCATCGCA |
| 359 | 5741 | 2045 | VEGSGSFTMGS |
| 359 | 5742 | 2046 | GTTGAAGGTAGTGGAAGCTTCACCATGGGGAGC |
| 359 | 5743 | 2047 | EAWDFNTGGV |
| 359 | 5744 | 2048 | GAGGCCTGGGACTTTAACACGGGGGGGGTC |
| 360 | 5745 | 2049 | GAGGTGCAGCTGGTGGAGTCGGGCCCAGGACTGGTGA |
| | | | AGCCTTCGGGGACCCTGTCCCTCACCTGCGCTGTCTCT |
| | | | GGTGACTCCATCGTCGGTAGTGACTGGTGGAGTTGGA |
| | | | TCCGCCAGCCCCCCGGGAAGGGGCTGGAGTGGATTGG |
| | | | AGATATCTATCATGGTGGGACCACCAGCTACAACCCG |
| | | | TCCCTTAAGAGTCGAGTCACCATGTCAGTAGACAAGT |
| | | | CCAAGAACCAATTCTCCCTGAAGCTGACCTCTGTCAC |
| | | | CGCCGCGGACACAGCCGTGTATTACTGTGCGAGACTC |
| | | | TCGGGAAATTGTAGTGGTGGTAGCTGTTACTCGCCCTT |
| | | | TGACCACTGGGGCCAGGGAACCCTGGTCACCGTCTCT |
| | | | TCA |
| 360 | 5746 | 2050 | EVQLVESGPGLVKPSGTLSLTCAVSGDSIVGSDWWSWIR |
| | | | QPPGKGLEWIGDIYHGGTTSYNPSLKSRVTMSVDKSKN |
| | | | QFSLKLTSVTAADTAVYYCARLSGNCSGGSCYSPFDHW |
| | | | GQGTLVTVSS |
| 360 | 5747 | 2051 | DSIVGSDWWS |
| 360 | 5748 | 2052 | GACTCCATCGTCGGTAGTGACTGGTGGAGT |
| 360 | 5749 | 2053 | DIYHGGTTSYNPSLKS |
| 360 | 5750 | 2054 | GATATCTATCATGGTGGGACCACCAGCTACAACCCGT |
| | | | CCCTTAAGAGT |
| 360 | 5751 | 2055 | ARLSGNCSGGSCYSPFDH |
| 360 | 5752 | 2056 | GCGAGACTCTCGGGAAATTGTAGTGGTGGTAGCTGTT |
| | | | ACTCGCCCTTTGACCAC |
| 360 | 5753 | 2057 | GACATCCAGATGACCCAGTCTCCATCCTCCTTGTCTGC |
| | | | ATCTGTGGGAGACAGAGTCACCATCACTTGCCGGGCA |
| | | | AGTCAGACCATTAATGGTTATTTAAATTGGTATCAAC |
| | | | AAAGACCAGGGAAAGCCCCTAAACTCCTGATCTCTGC |
| | | | TGCATCCAGTTTGCAGAGTGGGGTCCCATCAAGGTTC |
| | | | CGTGGCAGTGGATATGGGACAGATTTCACTCTCACCA |
| | | | TCAGCAGTCTGCAACCTGAAGATTTTGCAACTTATTTC |
| | | | TGTCAACAGAGTTACAATACTGTGTACACTTTTGGGC |
| | | | AGGGGACCAAAGTGGATATCAAA |
| 360 | 5754 | 2058 | DIQMTQSPSSLSASVGDRVTITCRASQTINGYLNWYQQR |
| | | | PGKAPKLLISAASSLQSGVPSRFRGSGYGTDFTLTISSLQP |
| | | | EDFATYFCQQSYNTVYTFGQGTKVDIK |
| 360 | 5755 | 2059 | RASQTINGYLN |
| 360 | 5756 | 2060 | CGGGCAAGTCAGACCATTAATGGTTATTTAAAT |
| 360 | 5757 | 2061 | AASSLQS |
| 360 | 5758 | 2062 | GCTGCATCCAGTTTGCAGAGT |
| 360 | 5759 | 2063 | QQSYNTVYT |
| 360 | 5760 | 2064 | CAACAGAGTTACAATACTGTGTACACT |
| 361 | 5761 | 2065 | CAGGTGCAGCTGGTGCAGTCTGGAGCAGAGGTGAAA |
| | | | AAGCCCGGGGAGTCTCTGAAGATCTCCTGTAAGGGTT |
| | | | CTGGATACAGCTTTAGCAGCTACTGGATCGGCTGGGT |
| | | | GCGCCAGATGCCCGGGAAAGGCCTGGAGTGGATGGG |
| | | | GATCATCTATCCTGGTGACTCTGATACCAGATACAGC |
| | | | CCGTCGCTCCAAGGCCAGGTCACCATCTCAGGCGACA |
| | | | AGTCCATCAGTACCGCCTTCCTGCAGTGGAGCAGCCT |
| | | | GAAGGCCTCGGACACCGCCATGTATTACTGTGCGAGA |
| | | | CCCATGACTACCCAAGAAGGTTTTGATTTGTGGGGCC |
| | | | AAGGGACAATGGTCACCGTCTCTTCA |
| 361 | 5762 | 2066 | QVQLVQSGAEVKKPGESLKISCKGSGYSFSSYWIGWVR |
| | | | QMPGKGLEWMGIIYPGDSDTRYSPSLQGQVTISGDKSIST |
| | | | AFLQWSSLKASDTAMYYCARPMTTQEGFDLWGQGTMV |
| | | | TVSS |
| 361 | 5763 | 2067 | YSFSSYWIG |
| 361 | 5764 | 2068 | TACAGCTTTAGCAGCTACTGGATCGGC |
| 361 | 5765 | 2069 | IIYPGDSDTRYSPSLQG |
| 361 | 5766 | 2070 | ATCATCTATCCTGGTGACTCTGATACCAGATACAGCCC |
| | | | GTCGCTCCAAGGC |
| 361 | 5767 | 2071 | ARPMTTQEGFDL |
| 361 | 5768 | 2072 | GCGAGACCCATGACTACCCAAGAAGGTTTTGATTTG |
| 361 | 5769 | 2073 | GACATCCGGTTGACCCAGTCTCCATCTTCTGTGTCTGC |
| | | | ATCTGTAGGAGACAGAGTCACCATCACTTGTCGGGCG |
| | | | AGTCAGGGTATTAGCGACTGGTTAGCCTGGTATCAGC |
| | | | AGAAACCAGGGAAAGCCCCTAAACTCCTGATCTATGC |
| | | | TGCATCCAGTTTGCAAAGTGGGGTCCCATCAAGGTTC |
| | | | AGCGGCAGTGGATCTGGGACAGATTTCACTCTCACTA |
| | | | TCAGCAGCCTGCAGCCTGAAGATTTTGCAACTTACTAT |
| | | | TGTCAACAGACTAACAGTTTCCTCCCGCTCACTTTCGG |
| | | | CGGAGGGACCAAAGTGGATATCAAA |
| 361 | 5770 | 2074 | DIRLTQSPSSVSASVGDRVTITCRASQGISDWLAWYQQK |
| | | | PGKAPKLLIYAASSLQSGVPSRFSGSGSGTDFTLTISSLQP |
| | | | EDFATYYCQQTNSFLPLTFGGGTKVDIK |
| 361 | 5771 | 2075 | RASQGISDWLA |
| 361 | 5772 | 2076 | CGGGCGAGTCAGGGTATTAGCGACTGGTTAGCC |
| 361 | 5773 | 2077 | AASSLQS |
| 361 | 5774 | 2078 | GCTGCATCCAGTTTGCAAAGT |
| 361 | 5775 | 2079 | QQTNSFLPLT |
| 361 | 5776 | 2080 | CAACAGACTAACAGTTTCCTCCCGCTCACT |
| 362 | 5777 | 2081 | GAGGTGCAGCTGGTGGAGTCGGGCCCCCGACTGGTGA |
| | | | AGCCTTCACAGACCCTGTCCCTCACCTGCACCGTCTAT |
| | | | GGTGGCTCCATCAGCGGTGGTCAAAACTACTACAGTT |
| | | | GGGTCCGCCAGCCCCCAGGGAAGGGCCTGGAGTGGAT |
| | | | TGGGTACATCTTTTCCAGTGGGACCACCTACTACAAG |
| | | | CCGTCCCTCAAGAGTCGAATTTCCATTTCATTTGACAC |
| | | | GTCCAAGAACCAGTTCTCCCTGAACCTGGCCTCTGTG |
| | | | ACGGCCGCAGACACGGCCGTATATTTCTGTGCCAGAT |
| | | | CCGCTGACATTGATATCGTTTGGGGGAGTTCTCTCTAC |
| | | | ATGCCTCTCTGGGGCCAGGGAACCCTGGTCACCGTCT |
| | | | CCTCA |
| 362 | 5778 | 2082 | EVQLVESGPRLVKPSQTLSLTCTVYGGSISGGQNYYSWV |
| | | | RQPPGKGLEWIGYIFSSGTTYYKPSLKSRISISFDTSKNQF |
| | | | SLNLASVTAADTAVYFCARSADIDIVWGSSLYMPLWGQ |
| | | | GTLVTVSS |
| 362 | 5779 | 2083 | GSISGGQNYYS |
| 362 | 5780 | 2084 | GGCTCCATCAGCGGTGGTCAAAACTACTACAGT |
| 362 | 5781 | 2085 | YIFSSGTTYYKPSLKS |
| 362 | 5782 | 2086 | TACATCTTTTCCAGTGGGACCACCTACTACAAGCCGTC |
| | | | CCTCAAGAGT |
| 362 | 5783 | 2087 | ARSADIDIVWGSSLYMPL |
| 362 | 5784 | 2088 | GCCAGATCCGCTGACATTGATATCGTTTGGGGGAGTT |
| | | | CTCTCTACATGCCTCTC |
| 362 | 5785 | 2089 | GAAATTGTGTTGACGCAGTCTCCAGGCACCCTGTCTTT |
| | | | GTCTCCAGGACAAAGAGCCACCCTCTCCTGCAGGGCC |
| | | | ACTCACATTGTCAGTAACAGCTACTTAGCCTGGTACC |
| | | | AGCAGAAACCTGGCCAGGCTCCCAGGCTCCTCATCCA |
| | | | TGGTGTTTCCATCAGGGCCACTGGCATCCCAGACAGG |
| | | | TTCTCTGGCAGTGGGTCTGGGACAGACTTCACTCTCAC |
| | | | CATCAGCAGACTGGAGCCTGAAGATTTTGCAGTGTAT |
| | | | TTCTGTCAGCAGTATGGTACCTCACCGTGGACGTTCGG |
| | | | CCAAGGGACCAAGCTGGAGATCAAA |
| 362 | 5786 | 2090 | EIVLTQSPGTLSLSPGQRATLSCRATHIVSNSYLAWYQQ |
| | | | KPGQAPRLLIHGVSIRATGIPDRFSGSGSGTDFTLTISRLE |
| | | | PEDFAVYFCQQYGTSPWTFGQGTKLEIK |
| 362 | 5787 | 2091 | RATHIVSNSYLA |
| 362 | 5788 | 2092 | AGGGCCACTCACATTGTCAGTAACAGCTACTTAGCC |
| 362 | 5789 | 2093 | GVSIRAT |
| 362 | 5790 | 2094 | GGTGTTTCCATCAGGGCCACT |
| 362 | 5791 | 2095 | QQYGTSPWT |
| 362 | 5792 | 2096 | CAGCAGTATGGTACCTCACCGTGGACG |
| 363 | 5793 | 2097 | CAGGTGCAGCTGGTGGAGTCTGGGGGAGGCCTGGTCA |
| | | | AGCCGGGGGGGTCCCTGAGACTCTCCTGTGTAGCCTC |
| | | | TGGATTTACCTTCAGCAGTTATGCCATGAATTGGGTCC |
| | | | GCCAGGCTCCAGGGAAGGGGCTGGACTGGGTCTCCTC |
| | | | TATCAGTGCTGGTAGCAATTTCATAGACGACGCAGAC |
| | | | TCAGTGAAGGGCCGCTTCACCATCTCCAGAGACAACG |
| | | | CCAGGAACTCACTGTTTCTGCAGATGAACAGCCTGAG |
| | | | AGCCGAGGACACGGCTGTGTATTACTGTGCGAGAATT |
| | | | GGGTACAGTAGCGCGCACCACTACCAGTACTACATGG |
| | | | ACGTCTGGGGCACGGGGACCACGGTCACCGTCTCCTC |
| | | | A |
| 363 | 5794 | 2098 | QVQLVESGGGLVKPGGSLRLSCVASGFTFSSYAMNWVR |
| | | | QAPGKGLDWVSSISAGSNFIDDADSVKGRFTISRDNARN |
| | | | SLFLQMNSLRAEDTAVYYCARIGYSSAHHYQYYMDVW |
| | | | GTGTTVTVSS |
| 363 | 5795 | 2099 | FTFSSYAMN |
| 363 | 5796 | 2100 | TTTACCTTCAGCAGTTATGCCATGAAT |
| 363 | 5797 | 2101 | SISAGSNFIDDADSVKG |
| 363 | 5798 | 2102 | TCTATCAGTGCTGGTAGCAATTTCATAGACGACGCAG |
| | | | ACTCAGTGAAGGGC |
| 363 | 5799 | 2103 | ARIGYSSAHHYQYYMDV |
| 363 | 5800 | 2104 | GCGAGAATTGGGTACAGTAGCGCGCACCACTACCAGT |
| | | | ACTACATGGACGTC |
| 363 | 5801 | 2105 | CAGTCTGTCCTGACGCAGCCGCCCTCAGTGTCTGGGG |
| | | | CCCCAGGGCAGAGGGTCACCATCTCCTGCACTGGCAG |
| | | | CAGCTCCAACATCGGGGCAGGTTATGATGTCCACTGG |
| | | | TACCAGGATCTTCCAGGAACTGCCCCCAAACTCCTCA |
| | | | TCTATGGTAACACCAATCGGCCCTCAGGGGTCCCTGA |
| | | | CCGATTCTCTGGCTCCAAGTCTGGCGCCTCAGCCTCCC |
| | | | TGGTCATCACTGGGCTCCAGGCTGAGGATGAGGCTGA |
| | | | TTATTACTGCCAGTCCTATGACAAGAGCCTGAGTGGT |
| | | | GGGTATGTCTTCGGAACTGGGACCAAGGTCACCGTCC |
| | | | TA |
| 363 | 5802 | 2106 | QSVLTQPPSVSGAPGQRVTISCTGSSSNIGAGYDVHWYQ |
| | | | DLPGTAPKLLIYGNTNRPSGVPDRFSGSKSGASASLVITG |
| | | | LQAEDEADYYCQSYDKSLSGGYVFGTGTKVTVL |
| 363 | 5803 | 2107 | TGSSSNIGAGYDVH |
| 363 | 5804 | 2108 | ACTGGCAGCAGCTCCAACATCGGGGCAGGTTATGATG |
| | | | TCCAC |
| 363 | 5805 | 2109 | GNTNRPS |
| 363 | 5806 | 2110 | GGTAACACCAATCGGCCCTCA |
| 363 | 5807 | 2111 | QSYDKSLSGGYV |
| 363 | 5808 | 2112 | CAGTCCTATGACAAGAGCCTGAGTGGTGGGTATGTC |
| 364 | 5809 | 2113 | CAGGTCCAGCTGGTGCAGTCTGGGGCTGAGGTGAAGA |
| | | | AGCCTGGGGCCTCAGTGAGGGTCACCTGCAAGGCCTC |
| | | | TGGATACACCTTCACCGACTACTTTATGAACTGGGTGC |
| | | | GACAGGCCCCTGGAGGGGGCCTTGAGTGGATGGGGTG |
| | | | GATCAATCCTCTCAGTGGAGTCACAAAATATGCACAG |
| | | | CAGTTTCAGGGCAGTGTCACCATGACCACTGACACGT |
| | | | CCATCACCACAGGCTACATGGAGCTGAGGAGCCTGAG |
| | | | AGTTGACGACACGGCCGTCTATTATTGTGCGAGCCAG |
| | | | TCTTCCCCTTACACCCCGGGCGCCATGGGCGTCTGGG |
| | | | GCCAAGGGACCACGGTCACCGTCTCTTCA |
| 364 | 5810 | 2114 | QVQLVQSGAEVKKPGASVRVTCKASGYTFTDYFMNWV |
| | | | RQAPGGGLEWMGWINPLSGVTKYAQQFQGSVTMTTDT |
| | | | SITTGYMELRSLRVDDTAVYYCASQSSPYTPGAMGVWG |
| | | | QGTTVTVSS |
| 364 | 5811 | 2115 | YTFTDYFMN |
| 364 | 5812 | 2116 | TACACCTTCACCGACTACTTTATGAAC |
| 364 | 5813 | 2117 | WINPLSGVTKYAQQFQG |
| 364 | 5814 | 2118 | TGGATCAATCCTCTCAGTGGAGTCACAAAATATGCAC |
| | | | AGCAGTTTCAGGGC |
| 364 | 5815 | 2119 | ASQSSPYTPGAMGV |
| 364 | 5816 | 2120 | GCGAGCCAGTCTTCCCCTTACACCCCGGGCGCCATGG |
| | | | GCGTC |
| 364 | 5817 | 2121 | TCCTATGAGCTGATACAGCTACCCTCGGTGTCAGTGTC |
| | | | CCCAGGACAGACGGCCAGGATCACCTGCTCTGGAGAT |
| | | | GCATTGCCAAAGCAATATGCTTATTGGTACCAGCAGA |
| | | | AGCCAGGCCAGGCCCCTGTGCTGGTGATATATAAAGA |
| | | | CAGTGAGAGGCCCTCAGGGATCCCTGAGCGATTCTCT |
| | | | GGCTCCAGCTCAGGGACAACAGTCACGTTGACCATCA |
| | | | GTGGAGTCCAGGCAGAAGACGAGGCTGACTATTACTG |
| | | | TCAATCAGCAGACAGCAGTGGTACTTATCCGGTGGTG |
| | | | TTCGGCGGAGGGACCAAGCTCACCGTCCTA |
| 364 | 5818 | 2122 | SYELIQLPSVSVSPGQTARITCSGDALPKQYAYWYQQKP |
| | | | GQAPVLVIYKDSERPSGIPERFSGSSSGTTVTLTISGVQAE |
| | | | DEADYYCQSADSSGTYPVVFGGGTKLTVL |
| 364 | 5819 | 2123 | SGDALPKQYAY |
| 364 | 5820 | 2124 | TCTGGAGATGCATTGCCAAAGCAATATGCTTAT |
| 364 | 5821 | 2125 | KDSERPS |
| 364 | 5822 | 2126 | AAAGACAGTGAGAGGCCCTCA |
| 364 | 5823 | 2127 | QSADSSGTYPVV |
| 364 | 5824 | 2128 | CAATCAGCAGACAGCAGTGGTACTTATCCGGTGGTG |
| 365 | 5825 | 2145 | GAGGTGCAGCTGGTGGAGTCTGGGGGAGGCCTGGTCA |
| (ADI- | | | AGCCTGGGGGGGCCCTGAGACTCTCCTGTGCAGCCTC |
| 31382) | | | TGGATTCAGCTTCAGGAGCTATAGCATGAACTGGGTC |
| | | | CGCCAGGCTCCAGGGAAGGGGCTGGAGTGGGTCTCAT |
| | | | CCATTAGTAGTAGTAGTAATTACATAAACTACGCAGA |
| | | | CTCAGTGAAGGGCCGATTCAGCATCTCCAGAGACAAC |
| | | | GCCAAGAACTCACTGTATCTGCAAATGAACAGCCTGA |
| | | | GAGCCGAGGACACGGCTGTCTATTACTGTGCGAGAGA |
| | | | TTTGTTACCCGTCGAGCGGGGTCCCGCTTTTGATATCT |
| | | | GGGGCCAAGGGACAATGGTCACCGTCTCTTCA |
| | 5826 | 2146 | EVQLVESGGGLVKPGGALRLSCAASGFSFRSYSMNWVR |
| | | | QAPGKGLEWVSSISSSSNYINYADSVKGRFSISRDNAKNS |
| | | | LYLQMNSLRAEDTAVYYCARDLLPVERGPAFDIWGQGT |
| | | | MVTVSS |
| | 5827 | 2147 | FSFRSYSMN |
| | 5828 | 2148 | SISSSSNYINYADSVKG |
| | 5829 | 2149 | ARDLLPVERGPAFDI |
| | 5830 | 2150 | TCCTACGAGCTGACACAGCCACCCTCAGTGTCTGGGG |
| | | | CCCCAGGGCAGAGGGTCACTATCTCCTGCACTGGGAG |
| | | | CAGCTCCAACATCGGGAGGGGTTATGATGTACACTGG |
| | | | TTCCAGCAGCTTCCAGGAGCAGCCCCCAAACTCCTCA |
| | | | TCTATGCTAACAGCAATCGGCCCTCAGGGGTCCCTGA |
| | | | CCGATTCTCTGGCTCCAAGTCTGGCACCTCAGCCTCCC |
| | | | TGGCCATCACTGGGCTCCAGGCTGAGGATGAGGCTGA |
| | | | TTATTACTGCCAGTCCTATGACAGCAGACTGGGTGGTT |
| | | | CGGTATTCGGCGGAGGGACCAAGGTGACCGTCCTA |
| | 5831 | 2151 | SYELTQPPSVSGAPGQRVTISCTGSSSNIGRGYDVHWFQ |
| | | | QLPGAAPKLLIYANSNRPSGVPDRFSGSKSGTSASLAITG |
| | | | LQAEDEADYYCQSYDSRLGGSVFGGGTKVTVL |
| | 5832 | 2152 | TGSSSNIGRGYDVH |
| | 5833 | 2153 | ANSNRPS |
| | 5834 | 2154 | QSYDSRLGGSV |
| 366 | 5835 | 2155 | GAGGTGCAGCTGGTGGAGTCTGGGGGAGGCCTGGTCA |
| (ADI- | | | AGCCTGGGGGGGCCCTGAGACTCTCCTGTGCAGCCTC |
| 31383) | | | TGGATTCAGCTTCAGGAGCTATAGCATGAACTGGGTC |
| | | | CGCCAGGCTCCAGGGAAGGGGCTGGAGTGGGTCTCAT |
| | | | CCATTAGTAGTAGTAGTAATTACATAAACTACGCAGA |
| | | | CTCAGTGAAGGGCCGATTCAGCATCTCCAGAGACAAC |
| | | | GCCAAGAACTCACTGTATCTGCAAATGAACAGCCTGA |
| | | | GAGCCGAGGACACGGCTGTCTATTACTGTGCGAGAGA |
| | | | TTTGTTACCCGTCGAGCGGGGTCCCGCTTTTGATATCT |
| | | | GGGGCCAAGGGACAATGGTCACCGTCTCTTCA |
| | 5836 | 2156 | EVQLVESGGGLVKPGGALRLSCAASGFSFRSYSMNWVR |
| | | | QAPGKGLEWVSSISSSSNYINYADSVKGRFSISRDNAKNS |
| | | | LYLQMNSLRAEDTAVYYCARDLLPVERGPAFDIWGQGT |
| | | | MVTVSS |
| | 5837 | 2157 | FSFRSYSMN |
| | 5838 | 2158 | SISSSSNYINYADSVKG |
| | 5839 | 2159 | ARDLLPVERGPAFDI |
| | 5840 | 2160 | TCCTATGAGCTGACACAGCCACCCTCAGTGTCTGGGG |
| | | | CCCCAGGGCAGAGGGTCACCATCTCCTGCACTGGGAG |
| | | | CAGCTCCAACATCGGGGCAGGTTATGATGTACACTGG |
| | | | TTCCAGCAGCTTCCAGGAGCAGCCCCCAAACTCCTCA |
| | | | TCTATCGTAACAGCAATCGGCCCTCAGGGGTCCCTGA |
| | | | CCGATTCTCTGGCTCCAAGTCTGGCACCTCAGCCTCCC |
| | | | TGGCCATCACTGGGCTCCAGGCTGAGGATGAGGCTGA |
| | | | TTATTACTGCCAGTCCTATGACAGCAGACTGGGTGGTT |
| | | | CGAATTTCGGCGGAGGGACCAAGGTGACCGTCCTA |
| | 5841 | 2161 | SYELTQPPSVSGAPGQRVTISCTGSSSNIGAGYDVHWFQ |
| | | | QLPGAAPKLLIYRNSNRPSGVPDRFSGSKSGTSASLAITG |
| | | | LQAEDEADYYCQSYDSRLGGSNFGGGTKVTVL |
| | 5842 | 2162 | TGSSSNIGAGYDVH |
| | 5843 | 2163 | RNSNRPS |
| | 5844 | 2164 | QSYDSRLGGSN |
| 367 | 5845 | 2165 | GAGGTGCAGCTGGTGGAGTCTGGGGGAGGCCTGGTCA |
| (ADI- | | | AGCCTGGGGGGGCCCTGAGACTCTCCTGTGCAGCCTC |
| 31384) | | | TGGATTCAGCTTCAGGAGCTATAGCATGAACTGGGTC |
| | | | CGCCAGGCTCCAGGGAAGGGGCTGGAGTGGGTCTCAT |
| | | | CCATTAGTGCTAGTAGTAATTACATAAACTACGCAGA |
| | | | CTCAGTGAAGGGCCGATTCAGCATCTCCAGAGACAAC |
| | | | GCCAAGAACTCACTGTATCTGCAAATGAACAGCCTGA |
| | | | GAGCCGAGGACACGGCTGTCTATTACTGTGCGAGAGA |
| | | | TTTGTTACCCGTCGAGCGGGGTCCCGCTTTTGATATCT |
| | | | GGGGCCAAGGGACAATGGTCACCGTCTCTTCA |
| | 5846 | 2166 | EVQLVESGGGLVKPGGALRLSCAASGFSFRSYSMNWVR |
| | | | QAPGKGLEWVSSISASSNYINYADSVKGRFSISRDNAKN |
| | | | SLYLQMNSLRAEDTAVYYCARDLLPVERGPAFDIWGQG |
| | | | TMVTVSS |
| | 5847 | 2167 | FSFRSYSMN |
| | 5848 | 2168 | SISASSNYINYADSVKG |
| | 5849 | 2169 | ARDLLPVERGPAFDI |
| | 5850 | 2170 | TCCTATGAGCTGACACAGCCACCCTCAGTGTCTGGGG |
| | | | CCCCAGGGCAGAGGGTCACCATCTCCTGCACTGGGAG |
| | | | CAGCTCCAACATCGGGGCAGGTTATGATGTACACTGG |
| | | | TTCCAGCAGCTTCCAGGAGCAGCCCCCAAACTCCTCA |
| | | | TCTATGCTAACAGCAATCGGCCCTCAGGGGTCCCTGA |
| | | | CCGATTCTCTGGCTCCAAGTCTGGCACCTCAGCCTCCC |
| | | | TGGCCATCACTGGGCTCCAGGCTGAGGATGAGGCTGA |
| | | | TTATTACTGCCAGTCCTATGACAGCAGACTGGGTGGTT |
| | | | CGGTATTCGGCGGAGGGACCAAGGTGACCGTCCTA |
| | 5851 | 2171 | SYELTQPPSVSGAPGQRVTISCTGSSSNIGAGYDVHWFQ |
| | | | QLPGAAPKLLIYANSNRPSGVPDRFSGSKSGTSASLAITG |
| | | | LQAEDEADYYCQSYDSRLGGSVFGGGTKVTVL |
| | 5852 | 2172 | TGSSSNIGAGYDVH |
| | 5853 | 2173 | ANSNRPS |
| | 5854 | 2174 | QSYDSRLGGSV |
| 368 | 5855 | 2175 | GAGGTGCAGCTGGTGGAGTCTGGGGGAGGCCTGGTCA |
| (ADI- | | | AGCCTGGGGGGGCCCTGAGACTCTCCTGTGCAGCCTC |
| 31385) | | | TGGATTCAGCTTCAGGAGCTATAGCATGAACTGGGTC |
| | | | CGCCAGGCTCCAGGGAAGGGGCTGGAGTGGGTCTCAT |
| | | | CCATTAGTAGTAGTAGTACTTACATAAACTACGCAGA |
| | | | CTCAGTGAAGGGCCGATTCAGCATCTCCAGAGACAAC |
| | | | GCCAAGAACTCACTGTATCTGCAAATGAACAGCCTGA |
| | | | GAGCCGAGGACACGGCTGTCTATTACTGTGCGAGAGA |
| | | | TTTGAGTCCCGTCGAGCGGGGTCCCGCTTTTGATATCT |
| | | | GGGGCCAAGGGACAATGGTCACCGTCTCTTCA |
| | 5856 | 2176 | EVQLVESGGGLVKPGGALRLSCAASGFSFRSYSMNWVR |
| | | | QAPGKGLEWVSSISSSSTYINYADSVKGRFSISRDNAKNS |
| | | | LYLQMNSLRAEDTAVYYCARDLSPVERGPAFDIWGQGT |
| | | | MVTVSS |
| | 5857 | 2177 | FSFRSYSMN |
| | 5858 | 2178 | SISSSSTYINYADSVKG |
| | 5859 | 2179 | ARDLSPVERGPAFDI |
| | 5860 | 2180 | TCCTATGAGCTGACACAGCCACCCTCAGTGTCTGGGG |
| | | | CCCCAGGGCAGAGGGTCACCATCTCCTGCACTGGGAG |
| | | | CAGCTCCAACATCGGGGCAGGTTATGATGTACACTGG |
| | | | TTCCAGCAGCTTCCAGGAGCAGCCCCCAAACTCCTCA |
| | | | TCTATGCTAACAGCAATCGGCCCTCAGGGGTCCCTGA |
| | | | CCGATTCTCTGGCTCCAAGTCTGGCACCTCAGCCTCCC |
| | | | TGGCCATCACTGGGCTCCAGGCTGAGGATGAGGCTGA |
| | | | TTATTACTGCCAGTCCTATGACAGCAGACTGGGTGGTT |
| | | | CGGTATTCGGCGGAGGGACCAAGGTGACCGTCCTA |
| | 5861 | 2181 | SYELTQPPSVSGAPGQRVTISCTGSSSNIGAGYDVHWFQ |
| | | | QLPGAAPKLLIYANSNRPSGVPDRFSGSKSGTSASLAITG |
| | | | LQAEDEADYYCQSYDSRLGGSVFGGGTKVTVL |
| | 5862 | 2182 | TGSSSNIGAGYDVH |
| | 5863 | 2183 | ANSNRPS |
| | 5864 | 2184 | QSYDSRLGGSV |
| 369 | 5865 | 2185 | GAGGTGCAGCTGGTGGAGTCTGGGGGAGGCCTGGTCA |
| (ADI- | | | AGCCTGGGGGGGCCCTGAGACTCTCCTGTGCAGCCTC |
| 31345) | | | TGGATTCAGCTTCAGGAGCTATAGCATGAACTGGGTC |
| | | | CGCCAGGCTCCAGGGAAGGGGCTGGAGTGGGTCTCAT |
| | | | CCATTAGTGCTAGTAGTAATTACATAAACTACGCAGA |
| | | | CTCAGTGAAGGGCCGATTCAGCATCTCCAGAGACAAC |
| | | | GCCAAGAACTCACTGTATCTGCAAATGAACAGCCTGA |
| | | | GAGCCGAGGACACGGCTGTCTATTACTGTGCGAGAGA |
| | | | TTTGTTACCCGTCGAGCGGGGTCCCGCTTTTGATATCT |
| | | | GGGGCCAAGGGACAATGGTCACCGTCTCTTCA |
| | 5866 | 2186 | EVQLVESGGGLVKPGGALRLSCAASGFSFRSYSMNWVR |
| | | | QAPGKGLEWVSSISASSNYINYADSVKGRFSISRDNAKN |
| | | | SLYLQMNSLRAEDTAVYYCARDLLPVERGPAFDIWGQG |
| | | | TMVTVSS |
| | 5867 | 2187 | FSFRSYSMN |
| | 5868 | 2188 | SISASSNYINYADSVKG |
| | 5869 | 2189 | ARDLLPVERGPAFDI |
| | 5870 | 2190 | TCCTACGAGCTGACACAGCCACCCTCAGTGTCTGGGG |
| | | | CCCCAGGGCAGAGGGTCACTATCTCCTGCACTGGGAG |
| | | | CAGCTCCAACATCGGGAGGGGTTATGATGTACACTGG |
| | | | TTCCAGCAGCTTCCAGGAGCAGCCCCCAAACTCCTCA |
| | | | TCTATGCTAACAGCAATCGGCCCTCAGGGGTCCCTGA |
| | | | CCGATTCTCTGGCTCCAAGTCTGGCACCTCAGCCTCCC |
| | | | TGGCCATCACTGGGCTCCAGGCTGAGGATGAGGCTGA |
| | | | TTATTACTGCCAGTCCTATGACAGCAGACTGGGTGGTT |
| | | | CGGTATTCGGCGGAGGGACCAAGGTGACCGTCCTA |
| | 5871 | 2191 | SYELTQPPSVSGAPGQRVTISCTGSSSNIGRGYDVHWFQ |
| | | | QLPGAAPKLLIYANSNRPSGVPDRFSGSKSGTSASLAITG |
| | | | LQAEDEADYYCQSYDSRLGGSVFGGGTKVTVL |
| | 5872 | 2192 | TGSSSNIGRGYDVH |
| | 5873 | 2193 | ANSNRPS |
| | 5874 | 2194 | QSYDSRLGGSV |
| 370 | 5875 | 2195 | GAGGTGCAGCTGGTGGAGTCTGGGGGAGGCCTGGTCA |
| (ADI- | | | AGCCTGGGGGGGCCCTGAGACTCTCCTGTGCAGCCTC |
| 31346) | | | TGGATTCAGCTTCAGGAGCTATAGCATGAACTGGGTC |
| | | | CGCCAGGCTCCAGGGAAGGGGCTGGAGTGGGTCTCAT |
| | | | CCATTAGTGCTAGTAGTAATTACATAAACTACGCAGA |
| | | | CTCAGTGAAGGGCCGATTCAGCATCTCCAGAGACAAC |
| | | | GCCAAGAACTCACTGTATCTGCAAATGAACAGCCTGA |
| | | | GAGCCGAGGACACGGCTGTCTATTACTGTGCGAGAGA |
| | | | TTTGTTACCCGTCGAGCGGGGTCCCGCTTTTGATATCT |
| | | | GGGGCCAAGGGACAATGGTCACCGTCTCTTCA |
| | 5876 | 2196 | EVQLVESGGGLVKPGGALRLSCAASGFSFRSYSMNWVR |
| | | | QAPGKGLEWVSSISASSNYINYADSVKGRFSISRDNAKN |
| | | | SLYLQMNSLRAEDTAVYYCARDLLPVERGPAFDIWGQG |
| | | | TMVTVSS |
| | 5877 | 2197 | FSFRSYSMN |
| | 5878 | 2198 | SISASSNYINYADSVKG |
| | 5879 | 2199 | ARDLLPVERGPAFDI |
| | 5880 | 2200 | TCCTATGAGCTGACACAGCCACCCTCAGTGTCTGGGG |
| | | | CCCCAGGGCAGAGGGTCACCATCTCCTGCACTGGGAG |
| | | | CAGCTCCAACATCGGGGCAGGTTATGATGTACACTGG |
| | | | TTCCAGCAGCTTCCAGGAGCAGCCCCCAAACTCCTCA |
| | | | TCTATCGTAACAGCAATCGGCCCTCAGGGGTCCCTGA |
| | | | CCGATTCTCTGGCTCCAAGTCTGGCACCTCAGCCTCCC |
| | | | TGGCCATCACTGGGCTCCAGGCTGAGGATGAGGCTGA |
| | | | TTATTACTGCCAGTCCTATGACAGCAGACTGGGTGGTT |
| | | | CGAATTTCGGCGGAGGGACCAAGGTGACCGTCCTA |
| | 5881 | 2201 | SYELTQPPSVSGAPGQRVTISCTGSSSNIGAGYDVHWFQ |
| | | | QLPGAAPKLLIYRNSNRPSGVPDRFSGSKSGTSASLAITG |
| | | | LQAEDEADYYCQSYDSRLGGSNFGGGTKVTVL |
| | 5882 | 2202 | TGSSSNIGAGYDVH |
| | 5883 | 2203 | RNSNRPS |
| | 5884 | 2204 | QSYDSRLGGSN |
| 371 | 5885 | 2205 | GAGGTGCAGCTGGTGGAGTCTGGGGGAGGCCTGGTCA |
| (ADI- | | | AGCCTGGGGGGGCCCTGAGACTCTCCTGTGCAGCCTC |
| 31354) | | | TGGATTCAGCTTCAGGAGCTATAGCATGAACTGGGTC |
| | | | CGCCAGGCTCCAGGGAAGGGGCTGGAGTGGGTCTCAT |
| | | | CCATTAGTAGTAGTAGTACTTACATAAACTACGCAGA |
| | | | CTCAGTGAAGGGCCGATTCAGCATCTCCAGAGACAAC |
| | | | GCCAAGAACTCACTGTATCTGCAAATGAACAGCCTGA |
| | | | GAGCCGAGGACACGGCTGTCTATTACTGTGCGAGAGA |
| | | | TTTGAGTCCCGTCGAGCGGGGTCCCGCTTTTGATATCT |
| | | | GGGGCCAAGGGACAATGGTCACCGTCTCTTCA |
| | 5886 | 2206 | EVQLVESGGGLVKPGGALRLSCAASGFSFRSYSMNWVR |
| | | | QAPGKGLEWVSSISSSSTYINYADSVKGRFSISRDNAKNS |
| | | | LYLQMNSLRAEDTAVYYCARDLSPVERGPAFDIWGQGT |
| | | | MVTVSS |
| | 5887 | 2207 | FSFRSYSMN |
| | 5888 | 2208 | SISSSSTYINYADSVKG |
| | 5889 | 2209 | ARDLSPVERGPAFDI |
| | 5890 | 2210 | TCCTACGAGCTGACACAGCCACCCTCAGTGTCTGGGG |
| | | | CCCCAGGGCAGAGGGTCACTATCTCCTGCACTGGGAG |
| | | | CAGCTCCAACATCGGGAGGGGTTATGATGTACACTGG |
| | | | TTCCAGCAGCTTCCAGGAGCAGCCCCCAAACTCCTCA |
| | | | TCTATGCTAACAGCAATCGGCCCTCAGGGGTCCCTGA |
| | | | CCGATTCTCTGGCTCCAAGTCTGGCACCTCAGCCTCCC |
| | | | TGGCCATCACTGGGCTCCAGGCTGAGGATGAGGCTGA |
| | | | TTATTACTGCCAGTCCTATGACAGCAGACTGGGTGGTT |
| | | | CGGTATTCGGCGGAGGGACCAAGGTGACCGTCCTA |
| | 5891 | 2211 | SYELTQPPSVSGAPGQRVTISCTGSSSNIGRGYDVHWFQ |
| | | | QLPGAAPKLLIYANSNRPSGVPDRFSGSKSGTSASLAITG |
| | | | LQAEDEADYYCQSYDSRLGGSVFGGGTKVTVL |
| | 5892 | 2212 | TGSSSNIGRGYDVH |
| | 5893 | 2213 | ANSNRPS |
| | 5894 | 2214 | QSYDSRLGGSV |
| 372 | 5895 | 2215 | GAGGTGCAGCTGGTGGAGTCTGGGGGAGGCCTGGTCA |
| (ADI- | | | AGCCTGGGGGGGCCCTGAGACTCTCCTGTGCAGCCTC |
| 31362) | | | TGGATTCAGCTTCAGGAGCTATAGCATGAACTGGGTC |
| | | | CGCCAGGCTCCAGGGAAGGGGCTGGAGTGGGTCTCAT |
| | | | CCATTAGTAGTAGTAGTACTTACATAAACTACGCAGA |
| | | | CTCAGTGAAGGGCCGATTCAGCATCTCCAGAGACAAC |
| | | | GCCAAGAACTCACTGTATCTGCAAATGAACAGCCTGA |
| | | | GAGCCGAGGACACGGCTGTCTATTACTGTGCGAGAGA |
| | | | TTTGAGTCCCGTCGAGCGGGGTCCCGCTTTTGATATCT |
| | | | GGGGCCAAGGGACAATGGTCACCGTCTCTTCA |
| | 5896 | 2216 | EVQLVESGGGLVKPGGALRLSCAASGFSFRSYSMNWVR |
| | | | QAPGKGLEWVSSISSSSTYINYADSVKGRFSISRDNAKNS |
| | | | LYLQMNSLRAEDTAVYYCARDLSPVERGPAFDIWGQGT |
| | | | MVTVSS |
| | 5897 | 2217 | FSFRSYSMN |
| | 5898 | 2218 | SISSSSTYINYADSVKG |
| | 5899 | 2219 | ARDLSPVERGPAFDI |
| | 5900 | 2220 | TCCTATGAGCTGACACAGCCACCCTCAGTGTCTGGGG |
| | | | CCCCAGGGCAGAGGGTCACCATCTCCTGCACTGGGAG |
| | | | CAGCTCCAACATCGGGGCAGGTTATGATGTACACTGG |
| | | | TTCCAGCAGCTTCCAGGAGCAGCCCCCAAACTCCTCA |
| | | | TCTATCGTAACAGCAATCGGCCCTCAGGGGTCCCTGA |
| | | | CCGATTCTCTGGCTCCAAGTCTGGCACCTCAGCCTCCC |
| | | | TGGCCATCACTGGGCTCCAGGCTGAGGATGAGGCTGA |
| | | | TTATTACTGCCAGTCCTATGACAGCAGACTGGGTGGTT |
| | | | CGAATTTCGGCGGAGGGACCAAGGTGACCGTCCTA |
| | 5901 | 2221 | SYELTQPPSVSGAPGQRVTISCTGSSSNIGAGYDVHWFQ |
| | | | QLPGAAPKLLIYRNSNRPSGVPDRFSGSKSGTSASLAITG |
| | | | LQAEDEADYYCQSYDSRLGGSNFGGGTKVTVL |
| | 5902 | 2222 | TGSSSNIGAGYDVH |
| | 5903 | 2223 | RNSNRPS |
| | 5904 | 2224 | QSYDSRLGGSN |

### Additional Embodiments:

[0323] Embodiment 1. An isolated antibody or an antigen-binding fragment thereor that specifically binds to Respiratory Syncytial Virus (RSV) F protein (F), wherein at least one of the CDRH1, a CDRH2, a CDRH3, a CDRL1, a CDRL2, and CDRL3 amino acid sequence of the antibody or the antigen-binding fragment thereof is at least 70% identical; at least 75% identical; 80% identical; at least 85% identical; at least 90% identical; at least 95% identical; at least 96% identical; at least 97% identical; at least 98% identical; at least 99%; and/or all percentages of identity in between; to at least one the CDRH1, a CDRH2, a CDRH3, a CDRL1, a CDRL2, and/or a CDRL3 amino acid sequences as disclosed in Table 6 of an antibody selected from Antibody Number 232 through Antibody Number 372 as disclosed in Table 6; and wherein said antibody or the antigen-binding fragment thereof also has one or more of the following characteristics:
[0324] a) the antibody or antigen-binding fragment thereof cross-competes with said antibody ar antigen-binding fragment thereof for binding to RSV-F;
[0325] b) the antibody or antigen-binding fragment thereof displays better binding affinity for the PreF form of RSV-F relative to the PostF form;
[0326] c) the antibody or antigen-binding fragment thereof displays a clean or low polyreactivity profile;
[0327] d) the antibody or antigen-binding fragment thereof displays neutralization activity toward RSV subtype A and RSV subtype B in vitro;
[0328] e) the antibody or antigen-binding fragment thereof displays antigenic site specificity for RSV-F at Site Ø, Site I, Site II, Site III, Site IV, or Site V;
[0329] f) the antibody or antigen-binding fragment thereof displays antigenic site specificity for RSV-F Site Ø, Site V, or Site III relative to RSV-F Site I, Site II, or Site IV;
[0330] g) at least a portion of the epitope with which the antibody or antigen-binding fragment thereof interacts comprises the α3 helix and β3/β4 hairpin of PreF;
[0331] h) the antibody or antigen-binding fragment thereof displays an in vitro neutralization potency (IC₅₀) of between about 0.5 microgram/milliliter (ug/ml) to about 5 ug/ml; between about 0.05 ug/ml to about 0.5 ug/ml; or less than about 0.05 mg/ml;
[0332] i) the binding affinity and/or epitopic specificity of the antibody or antigen-binding fragment thereof for any one of the RSV-F variants designated as 1, 2, 3, 4, 5, 6, 7, 8, 9, and DG in FIG. 7A is reduced or eliminated relative to the binding affinity and/or epitopic specificity of said antibody or antigen-binding fragment thereof for the RSV-F or RSV-F DS-Cav1;
[0333] j) the antibody or antigen-binding fragment thereof of displays a cross-neutalization potency (IC₅₀) against human metapneumovirus (HMPV);
[0334] k) the antibody or antigen-binding fragment thereof does not complete with D25, MPE8, palivisumab, motavizumab, or AM-14; or
[0335] l) the antibody or antigen-binding fragment thereof displays at least about 2-fold; at least about 3-fold; at least about 4-fold; at least about 5-fold; at least about 6-fold; at least about 7-fold; at least about 8-fold; at least about 9-fold; at least about 10-fold; at least about 15-fold; at least about 20-fold; at least about 25-fold; at least about 30-fold; at least about 35-fold; at least about 40-fold; at least about 50-fold; at least about 55-fold; at least about 60-fold; at least about 70-fold; at least about 80-fold; at least about 90-fold; at least about 100-fold; greater than about 100-fold; and folds in between any of the foregoing; greater neutralization potency (IC50) than D25 and/or palivizumab.

[0336] Embodiment 2. The isolated antibody or antigen-binding fragment thereof of Embodiment 1, wherein the antibody or antigen-binding fragment thereof comprises: at least two; at least three; at least 4; at least 5; at least 6; at least 7; at least 8; at least 9; at least 10; at least 11; or at least 12; of characteristics a) through l).

[0337] Embodiment 3. The isolated antibody or antigen-binding fragment thereof of Embodiment 1 or 2, wherein the antibody or antigen-binding fragment thereof comprises:
[0338] a) the CDRH3 amino acid sequence of any one of the antibodies designated Antibody Number 232 through Antibody Number 372 as disclosed in Table 6;
[0339] b) the CDRH2 amino acid sequence of any one of the antibodies designated Antibody Number 232 through Antibody Number 372 as disclosed in Table 6;
[0340] c) the CDRH1 amino acid sequence of any one of the antibodies designated Antibody Number 232 through Antibody Number 372 as disclosed in Table 6;
[0341] d) the CDRL3 amino acid sequence of any one of the antibodies designated Antibody Number 232 through Antibody Number 372 as disclosed in Table 6;
[0342] e) the CDRL2 amino acid sequence of any one of the antibodies designated Antibody Number 232 through Antibody Number 372 as disclosed in Table 6;
[0343] f) the CDRL1 amino acid sequence of any one of the antibodies designated Antibody Number 232 through Antibody Number 372 as disclosed in Table 6; or
[0344] g) any combination of two or more of a), b), c), d), e), and f).

[0345] Embodiment 4. The isolated antibody or antigen-binding fragment thereof of any one of Embodiments 1 through 3, wherein the antibody or antigen-binding fragment thereof comprises:
[0346] a) a heavy chain (HC) amino acid sequence of any one of the antibodies designated Antibody Number 232 through Antibody Number 372 as disclosed in Table 6; and/or
[0347] b) a light chain (LC) amino acid sequence of any one of the antibodies designated Antibody Number 232 through Antibody Number 372 as disclosed in Table 6.

[0348] Embodiment 5. The isolated antibody or antigen-binding fragment thereof of any one of Embodiments 1 through 4, wherein the antibody is selected from the group consisting antibodies that are at least 70% identical; at least 75% identical; 80% identical; at least 85% identical; at least 90% identical; at least 95% identical; at least 96% identical; at least 97% identical; at least 98% identical; at least 99%; and/or all percentages of identity in between; to any one of the antibodies designated as Antibody Number 232 through Antibody Number 372 as disclosed in Table 6.

[0349] Embodiment 6. The isolated antibody or antigen-binding fragment thereof of any one of Embodiments 1 through 5, wherein the antibody is selected from the group consisting of the antibodies designated as Antibody 232 through Antibody Number 372 as disclosed in Table 6.

[0350] Embodiment 7. An isolated nucleic acid sequence encoding an antibody or antigen-binding fragment thereof according to any one of Embodiments 1 through 6.

[0351] Embodiment 8. An expression vector comprising the isolated nucleic acid sequence according to Embodiment 7.

[0352] Embodiment 9. A host cell transfected, transformed, or transduced with the nucleic acid sequence according to Embodiment 7 or the expression vector according to Embodiment 8.

[0353] Embodiment 10. A pharmaceutical composition comprising: one or more of the isolated antibodies or antigen-binding fragments thereof according to any one of Embodiments 1 through 6; and a pharmaceutically acceptable carrier and/or excipient.

[0354] Embodiment 11. A pharmaceutical composition comprising: one or more nucleic acid sequences according to Embodiment 7; or one or more the expression vectors according to Embodiment 8; and a pharmaceutically acceptable carrier and/or excipient.

[0355] Embodiment 12. A transgenic organism comprising the nucleic acid sequence according to Embodiment 7; or the expression vector according to Embodiment 8.

[0356] Embodiment 13. A method of treating or preventing a Respiratory Syncytial Virus (RSV) infection, are at least one symptom associated with RSV infection, comprising administering to a patient in need thereof or suspected of being in need thereof:
[0357] a) one or more antibodies or antigen-binding fragments thereof according to any of Embodiments 1 through 6;
[0358] b) a nucleic acid sequences according to Embodiment 7;
[0359] c) an expression vector according to Embodiment 8;
[0360] d) a host cell according to Embodiment 9; or
[0361] e) a pharmaceutical composition according Embodiment 10 or Embodiment 11; such that the RSV infection is treated or prevented, or the at least on symptom associated with RSV infection is treated, alleviated, or reduced in severity.

[0362] Embodiment 14. A method of treating or preventing either a Respiratory Syncytial Virus (RSV) infection or a human metapneumovirus (HMPV) infection, are at least one symptom associated with said RSV infection or said HMPV infection, comprising administering to a patient in need thereof or suspected of being in need thereof:
[0363] a) one or more antibodies or antigen-binding fragments thereof according to any of Embodiments 1 through 6;
[0364] b) a nucleic acid sequences according to Embodiment 7;
[0365] c) an expression vector according to Embodiment 8;
[0366] d) a host cell according to Embodiment 9; or
[0367] e) a pharmaceutical composition according Embodiment 10 or Embodiment 11; such that the RSV infection is treated or prevented, or the at least on symptom associated with RSV infection is treated, alleviated, or reduced in severity.

[0368] Embodiment 15. The method according to Embodiment 14, wherein the one or more antibodies or antigen-binding fragments thereof comprises Antibody Number 340.

[0369] Embodiment 16. The method according to any one of Embodiments 13 through 15, wherein the method further comprises administering to the patient a second therapeutic agent.

[0370] Embodiment 17. The method according to Embodiment 16, wherein the second therapeutic agent is selected group consisting of: an antiviral agent; a vaccine specific for RSV, a vaccine specific for influenza virus, or a vaccine specific for metapneumovirus (MPV); an siRNA specific for an RSV antigen or a metapneumovirus (MPV) antigen; a second antibody specific for an RSV antigen or a metapneumovirus (MPV) antigen; an anti-IL4R antibody, an antibody specific for an influenza virus antigen, an anti-RSV-G antibody and a NSAID.

[0371] Embodiment 18. A pharmaceutical composition comprising any one or more of the isolated antibodies or antigen-binding fragments thereof of any one of Embodiments 1 through 7 and a pharmaceutically acceptable carrier and/or excipient.

[0372] Embodiment 19. The pharmaceutical composition according to Embodiment 18 for use in preventing a respiratory syncytial virus (RSV) infection in a patient in need thereof or suspected of being in need thereof, or for treating a patient suffering from an RSV infection, or for ameliorating at least one symptom or complication associated with the infection, wherein the infection is either prevented, or at least one symptom or complication associated with the infection is prevented, ameliorated, or lessened in severity and/or duration as a result of such use.

[0373] Embodiment 20. The pharmaceutical composition according to Embodiment 18 for us in treating or preventing either a Respiratory Syncytial Virus (RSV) infection or a human metapneumovirus (HMPV) infection, or at least one symptom associated with said RSV infection or said HMPV infection, in a patient in need thereof or suspected of being in need thereof, wherein the infection is either prevented, or at least one symptom or complication associated with the infection is prevented, ameliorated, or lessened in severity and/or duration as a result of such use.

[0374] Embodiment 21. Use of the pharmaceutical composition of Embodiment 18 in the manufacture of a medicament for preventing a respiratory syncytial virus (RSV) infection in a patient in need thereof, or for treating a patient suffering from an RSV infection, or for ameliorating at least one symptom or complication associated with the infection, wherein the infection is either prevented, or at least one symptom or complication associated with the infection is prevented, ameliorated, or lessened in severity and/or duration.

[0375] Embodiment 22. Use of the pharmaceutical composition of Embodiment 18 in the manufacture of a medicament for preventing either a Respiratory Syncytial Virus (RSV) infection or a human metapneumovirus (HMPV) infection, or at least one symptom associated with said RSV infection or said HMPV infection, in a patient in need thereof or suspected of being in need thereof, wherein the infection is either prevented, or at least one symptom or complication associated with the infection is prevented, ameliorated, or lessened in severity and/or duration as a result of such use.

The application's sequence listing, which the Patent Office published only in electronic form, follows.

SEQUENCE LISTING (2224 sequences)

SEQ ID NO: 1 - DNA, 378 bp, Artificial Sequence
  source: /note="Description of Artificial Sequence: Synthetic heavy chain variable region"
caggtgcagctacagcagtggggcgcaggactgttgaagccttcggagaccctgtccctcacctgcgctgtctatggtgggtccttcagtggttattcctggagctggatccgccagaccccagggaaggggctggagtggattggggaaatcaatcatagaggaagcaccaactacaacccgtccctcaagagtcgagtcaccatgtcagtggacacgtcccagaaccagatctccctgagggtgacctctgtgaccgccgcggacacggctgtatatttctgtgcggggaccaattatggagaggttaatacgagtaaccagtacttcttcggtatggacgtctggggccaagggaccacggtcaccgtctcctca

SEQ ID NO: 2 - protein, 126 aa, Artificial Sequence
  source: /note="Description of Artificial Sequence: Synthetic heavy chain variable region"
QVQLQQWGAGLLKPSETLSLTCAVYGGSFSGYSWSWIRQTPGKGLEWIGEINHRGSTNYNPSLKSRVTMSVDTSQNQISLRVTSVTAADTAVYFCAGTNYGEVNTSNQYFFGMDVWGQGTTVTVSS

SEQ ID NO: 3 - protein, 9 aa, Artificial Sequence
  source: /note="Description of Artificial Sequence: Synthetic heavy chain variable region CDR H1"
GSFSGYSWS

SEQ ID NO: 4 - DNA, 27 bp, Artificial Sequence
  source: /note="Description of Artificial Sequence: Synthetic heavy chain variable region CDR H1"
gggtccttcagtggttattcctggagc

SEQ ID NO: 5 - protein, 16 aa, Artificial Sequence
  source: /note="Description of Artificial Sequence: Synthetic heavy chain variable region CDR H2"
EINHRGSTNYNPSLKS

SEQ ID NO: 6 - DNA, 48 bp, Artificial Sequence
  source: /note="Description of Artificial Sequence: Synthetic heavy chain variable region CDR H2"
gaaatcaatcatagaggaagcaccaactacaacccgtccctcaagagt

SEQ ID NO: 7 - protein, 20 aa, Artificial Sequence
  source: /note="Description of Artificial Sequence: Synthetic heavy chain variable region CDR H3"
AGTNYGEVNTSNQYFFGMDV

SEQ ID NO: 8 - DNA, 60 bp, Artificial Sequence
  source: /note="Description of Artificial Sequence: Synthetic heavy chain variable region CDR H3"
gcggggaccaattatggagaggttaatacgagtaaccagtacttcttcggtatggacgtc

SEQ ID NO: 9 - DNA, 321 bp, Artificial Sequence
  source: /note="Description of Artificial Sequence: Synthetic light chain variable region"
gacatccaggtgacccagtctccatcctccctgtctgcatctgtaggagacagagtcaccatcacttgccgggcaagtcagagcattggcacctatttaaattggtatcagcagaaaccagggaaaccccctaaactcctgatctatgctgcatccaatttggaaagtggggtcccatcaagtttcagtggcagtggatctgggacacatttcactctcaccatcagcagtctgcaacctgaacattttgcaacttactactgtcaacagagttacagtaccccgctcactttcggcggagggaccaaggtggaaatcaaa

SEQ ID NO: 10 - protein, 107 aa, Artificial Sequence
  source: /note="Description of Artificial Sequence: Synthetic light chain variable region"
DIQVTQSPSSLSASVGDRVTITCRASQSIGTYLNWYQQKPGKPPKLLIYAASNLESGVPSSFSGSGSGTHFTLTISSLQPEHFATYYCQQSYSTPLTFGGGTKVEIK

SEQ ID NO: 11 - protein, 11 aa, Artificial Sequence
  source: /note="Description of Artificial Sequence: Synthetic light chain variable region CDR L1"
RASQSIGTYLN

SEQ ID NO: 12 - DNA, 33 bp, Artificial Sequence
  source: /note="Description of Artificial Sequence: Synthetic light chain variable region CDR L1"
cgggcaagtcagagcattggcacctatttaaat

SEQ ID NO: 13 - protein, 7 aa, Artificial Sequence
  source: /note="Description of Artificial Sequence: Synthetic light chain variable region CDR L2"
AASNLES

SEQ ID NO: 14 - DNA, 21 bp, Artificial Sequence
  source: /note="Description of Artificial Sequence: Synthetic light chain variable region CDR L2"
gctgcatccaatttggaaagt

SEQ ID NO: 15 - protein, 9 aa, Artificial Sequence
  source: /note="Description of Artificial Sequence: Synthetic light chain variable region CDR L3"
QQSYSTPLT

SEQ ID NO: 16 - DNA, 27 bp, Artificial Sequence
  source: /note="Description of Artificial Sequence: Synthetic light chain variable region CDR L3"
caacagagttacagtaccccgctcact

SEQ ID NO: 17 - DNA, 384 bp, Artificial Sequence
  source: /note="Description of Artificial Sequence: Synthetic heavy chain variable region"
caggtgcagctgcaggagtcgggcccaggactggtgaagccttcacagaccctgtccctcacctgcactgtctctggtccctccatcagcagtggtgattactactggacttggatccgccagcccccagggaagggcctggagtggattggctacatctataacagtgggagcaccgactacaacccgtccctcaagagtcgtatcaccatgtcactagacaggtccaagaaccagttctccctgaatctgagctctgtgactgccgcagacacggccgtgtatttctgtgccagggatgtgggtactctggtactaccaactgttgcttactactacggcatggacgtctggggccaagggaccacggtcaccgtctcctca

SEQ ID NO: 18 - protein, 128 aa, Artificial Sequence
  source: /note="Description of Artificial Sequence: Synthetic heavy chain variable region"
QVQLQESGPGLVKPSQTLSLTCTVSGPSISSGDYYWTWIRQPPGKGLEWIGYIYNSGSTDYNPSLKSRITMSLDRSKNQFSLNLSSVTAADTAVYFCARDVGTLVLPTVAYYYGMDVWGQGTTVTVSS

SEQ ID NO: 19 - protein, 11 aa, Artificial Sequence
  source: /note="Description of Artificial Sequence: Synthetic heavy chain variable region CDR H1"
PSISSGDYYWT

SEQ ID NO: 20 - DNA, 33 bp, Artificial Sequence
  source: /note="Description of Artificial Sequence: Synthetic heavy chain variable region CDR H1"
ccctccatcagcagtggtgattactactggact

SEQ ID NO: 21 - protein, 16 aa, Artificial Sequence
  source: /note="Description of Artificial Sequence: Synthetic heavy chain variable region CDR H2"
YIYNSGSTDYNPSLKS

SEQ ID NO: 22 - DNA, 48 bp, Artificial Sequence
  source: /note="Description of Artificial Sequence: Synthetic heavy chain variable region CDR H2"
tacatctataacagtgggagcaccgactacaacccgtccctcaagagt

SEQ ID NO: 23 - protein, 20 aa, Artificial Sequence
  source: /note="Description of Artificial Sequence: Synthetic heavy chain variable region CDR H3"
ARDVGTLVLPTVAYYYGMDV

SEQ ID NO: 24 - DNA, 60 bp, Artificial Sequence
  source: /note="Description of Artificial Sequence: Synthetic heavy chain variable region CDR H3"
gccagggatgtgggtactctggtactaccaactgttgcttactactacggcatggacgtc

SEQ ID NO: 25 - DNA, 327 bp, Artificial Sequence
  source: /note="Description of Artificial Sequence: Synthetic light chain variable region"
gaaattgtattgacgcagtctccaggcaccctgtctttgtctccgggggaaagagccaccctctcctgcagggccagtgagagtattagcagcagctacttagcctggtaccagcagaaacctggccaggctcccagactcctcatctatgatgcgtccagcagggccactggcatcccagacaggttcagtggcagtgggtctgggacagacttcactctcaccatcagcagtctggagcctgaagattttgcagtgtattactgtcagcagtatggtagctcacccctggtcactttcggccctgggaccaaagtggatatcaaa

SEQ ID NO: 26 - protein, 109 aa, Artificial Sequence
  source: /note="Description of Artificial Sequence: Synthetic light chain variable region"
EIVLTQSPGTLSLSPGERATLSCRASESISSSYLAWYQQKPGQAPRLLIYDASSRATGIPDRFSGSGSGTDFTLTISSLEPEDFAVYYCQQYGSSPLVTFGPGTKVDIK

SEQ ID NO: 27 - protein, 12 aa, Artificial Sequence
  source: /note="Description of Artificial Sequence: Synthetic light chain variable region CDR L1"
RASESISSSYLA

SEQ ID NO: 28 - DNA, 36 bp, Artificial Sequence
  source: /note="Description of Artificial Sequence: Synthetic light chain variable region CDR L1"
agggccagtgagagtattagcagcagctacttagcc

SEQ ID NO: 29 - protein, 7 aa, Artificial Sequence
  source: /note="Description of Artificial Sequence: Synthetic light chain variable region CDR L2"
DASSRAT

SEQ ID NO: 30 - DNA, 21 bp, Artificial Sequence
  source: /note="Description of Artificial Sequence: Synthetic light chain variable region CDR L2"
gatgcgtccagcagggccact

SEQ ID NO: 31 - protein, 10 aa, Artificial Sequence
  source: /note="Description of Artificial Sequence: Synthetic light chain variable region CDR L3"
QQYGSSPLVT

SEQ ID NO: 32 - DNA, 30 bp, Artificial Sequence
  source: /note="Description of Artificial Sequence: Synthetic light chain variable region CDR L3"
cagcagtatggtagctcacccctggtcact

SEQ ID NO: 33 - DNA, 363 bp, Artificial Sequence
  source: /note="Description of Artificial Sequence: Synthetic heavy chain variable region"
caggtccagctggtgcagtctggaactgaggtgaagaagcctggggcctcagtgaaggtctcctgtaaggctgctggttacacctttagcaactacggtgtcagttgggtgcgacaggcccctggacaggggcttgagtggatgggatggatcagcgcttataatggtaacacaaaatttgcacagaaggtccagggcagactcaccatgaccacagacacatctaccagcacagcctacatggaattgaggaacctcagatctgacgacacggccgtgtattattgtgcgagagaatcaggggcaacagcggctgctatgtttgactactggggccagggaaccctggtcaccgtctcctca

SEQ ID NO: 34 - protein, 121 aa, Artificial Sequence
  source: /note="Description of Artificial Sequence: Synthetic heavy chain variable region"
QVQLVQSGTEVKKPGASVKVSCKAAGYTFSNYGVSWVRQAPGQGLEWMGWISAYNGNTKFAQKVQGRLTMTTDTSTSTAYMELRNLRSDDTAVYYCARESGATAAAMFDYWGQGTLVTVSS

SEQ ID NO: 35 - protein, 9 aa, Artificial Sequence
  source: /note="Description of Artificial Sequence: Synthetic heavy chain variable region CDR H1"
YTFSNYGVS

SEQ ID NO: 36 - DNA, 27 bp, Artificial Sequence
  source: /note="Description of Artificial Sequence: Synthetic heavy chain variable region CDR H1"
tacacctttagcaactacggtgtcagt

SEQ ID NO: 37 - protein, 17 aa, Artificial Sequence
  source: /note="Description of Artificial Sequence: Synthetic heavy chain variable region CDR H2"
WISAYNGNTKFAQKVQG

SEQ ID NO: 38 - DNA, 51 bp, Artificial Sequence
  source: /note="Description of Artificial Sequence: Synthetic heavy chain variable region CDR H2"
tggatcagcgcttataatggtaacacaaaatttgcacagaaggtccagggc

SEQ ID NO: 39 - protein, 14 aa, Artificial Sequence
  source: /note="Description of Artificial Sequence: Synthetic heavy chain variable region CDR H3"
ARESGATAAAMFDY

SEQ ID NO: 40 - DNA, 42 bp, Artificial Sequence
  source: /note="Description of Artificial Sequence: Synthetic heavy chain variable region CDR H3"
gcgagagaatcaggggcaacagcggctgctatgtttgactac

SEQ ID NO: 41 - DNA, 336 bp, Artificial Sequence
  source: /note="Description of Artificial Sequence: Synthetic light chain variable region"
gaaacgacactcacgcagtctccactctccctgcccgtcacccttggacagccggcctccatctcctgcaggtctagtcaaagcctcgaatacagtgatggaaacatctacttgagttggtttcaacagaggccaggccaatctccaaggcgcctaatttataaggtttctcaccgggactctggggtcccagacagattcagcggcagtgggtcaggcactgatttcacactgaaaatcgccagggtggaggctgaggatgttgcagtttattactgcatgcaagctatacactggcctcgaacttttggccaggggaccaaagtggatatcaaa

SEQ ID NO: 42 - protein, 112 aa, Artificial Sequence
  source: /note="Description of Artificial Sequence: Synthetic light chain variable region"
ETTLTQSPLSLPVTLGQPASISCRSSQSLEYSDGNIYLSWFQQRPGQSPRRLIYKVSHRDSGVPDRFSGSGSGTDFTLKIARVEAEDVAVYYCMQAIHWPRTFGQGTKVDIK

SEQ ID NO: 43 - protein, 16 aa, Artificial Sequence
  source: /note="Description of Artificial Sequence: Synthetic light chain variable region CDR L1"
RSSQSLEYSDGNIYLS

SEQ ID NO: 44 - DNA, 48 bp, Artificial Sequence
  source: /note="Description of Artificial Sequence: Synthetic light chain variable region CDR L1"
aggtctagtcaaagcctcgaatacagtgatggaaacatctacttgagt

SEQ ID NO: 45 - protein, 7 aa, Artificial Sequence
  source: /note="Description of Artificial Sequence: Synthetic light chain variable region CDR L2"
KVSHRDS

SEQ ID NO: 46 - DNA, 21 bp, Artificial Sequence
  source: /note="Description of Artificial Sequence: Synthetic light chain variable region CDR L2"
aaggtttctcaccgggactct

SEQ ID NO: 47 - protein, 9 aa, Artificial Sequence
  source: /note="Description of Artificial Sequence: Synthetic light chain variable region CDR L3"
MQAIHWPRT

SEQ ID NO: 48 - DNA, 27 bp, Artificial Sequence
  source: /note="Description of Artificial Sequence: Synthetic light chain variable region CDR L3"
atgcaagctatacactggcctcgaact

SEQ ID NO: 49 - DNA, 378 bp, Artificial Sequence
  source: /note="Description of Artificial Sequence: Synthetic heavy chain variable region"
caggtgcagctgcaggagtcgggcccaagactggtgaagccttcacagaccctgtccctcatctgcgatgtctctggtggctccatcggcagtggtgaccactactggagttggatccgccagccccccgggaagggcctcgagtggattgggtacatctattacagtgggaccacttactacaacccgtccctcaagagtcgagtgaccatttcagcagacacgtccaagaaccagttgtccctgaaattgagttctgtgactgccgcagacacggccatttatttctgtgccagagatgggggttatgatcacgtctgggggactcatcgttatttcgacaagtggggccagggaaccctggtcaccgtctcctca

SEQ ID NO: 50 - protein, 126 aa, Artificial Sequence
  source: /note="Description of Artificial Sequence: Synthetic heavy chain variable region"
QVQLQESGPRLVKPSQTLSLICDVSGGSIGSGDHYWSWIRQPPGKGLEWIGYIYYSGTTYYNPSLKSRVTISADTSKNQLSLKLSSVTAADTAIYFCARDGGYDHVWGTHRYFDKWGQGTLVTVSS

SEQ ID NO: 51 - protein, 11 aa, Artificial Sequence
  source: /note="Description of Artificial Sequence: Synthetic heavy chain variable region CDR H1"
GSIGSGDHYWS

SEQ ID NO: 52 - DNA, 33 bp, Artificial Sequence
  source: /note="Description of Artificial Sequence: Synthetic heavy chain variable region CDR H1"
ggctccatcggcagtggtgaccactactggagt

SEQ ID NO: 53 - protein, 16 aa, Artificial Sequence
  source: /note="Description of Artificial Sequence: Synthetic heavy chain variable region CDR H2"
YIYYSGTTYYNPSLKS

SEQ ID NO: 54 - DNA, 48 bp, Artificial Sequence
  source: /note="Description of Artificial Sequence: Synthetic heavy chain variable region CDR H2"
tacatctattacagtgggaccacttactacaacccgtccctcaagagt

SEQ ID NO: 55 - protein, 18 aa, Artificial Sequence
  source: /note="Description of Artificial Sequence: Synthetic heavy chain variable region CDR H3"
ARDGGYDHVWGTHRYFDK

SEQ ID NO: 56 - DNA, 54 bp, Artificial Sequence
  source: /note="Description of Artificial Sequence: Synthetic heavy chain variable region CDR H3"
gccagagatgggggttatgatcacgtctgggggactcatcgttatttcgacaag

SEQ ID NO: 57 - DNA, 324 bp, Artificial Sequence
  source: /note="Description of Artificial Sequence: Synthetic light chain variable region"
gaaattgtattgacacagtctccaggcaccctgtctttgtctcccggggaaagagccaccctctcctgcagggccagtcagagtgttagcaacagttacttagcctggtaccagcagaaacctggccaggctcccaggctcctcatctatggtgtttccaccagggccactggcatcccagaccggttcagtggcagcgggtctgggacagacttcaccctcaccatcagcagactggaacctgaagattttgcaatgtatcactgtcagcagtatggtgcctcaccttggacgttcggccaagggaccaaagtggatatcaaa

SEQ ID NO: 58 - protein, 108 aa, Artificial Sequence
  source: /note="Description of Artificial Sequence: Synthetic light chain variable region"
EIVLTQSPGTLSLSPGERATLSCRASQSVSNSYLAWYQQKPGQAPRLLIYGVSTRATGIPDRFSGSGSGTDFTLTISRLEPEDFAMYHCQQYGASPWTFGQGTKVDIK

SEQ ID NO: 59 - protein, 12 aa, Artificial Sequence
  source: /note="Description of Artificial Sequence: Synthetic light chain variable region CDR L1"
RASQSVSNSYLA

SEQ ID NO: 60 - DNA, 36 bp, Artificial Sequence
  source: /note="Description of Artificial Sequence: Synthetic light chain variable region CDR L1"
agggccagtcagagtgttagcaacagttacttagcc

SEQ ID NO: 61 - protein, 7 aa, Artificial Sequence
  source: /note="Description of Artificial Sequence: Synthetic light chain variable region CDR L2"
GVSTRAT

SEQ ID NO: 62 - DNA, 21 bp, Artificial Sequence
  source: /note="Description of Artificial Sequence: Synthetic light chain variable region CDR L2"
ggtgtttccaccagggccact

SEQ ID NO: 63 - protein, 9 aa, Artificial Sequence
  source: /note="Description of Artificial Sequence: Synthetic light chain variable region CDR L3"
QQYGASPWT

SEQ ID NO: 64 - DNA, 27 bp, Artificial Sequence
  source: /note="Description of Artificial Sequence: Synthetic light chain variable region CDR L3"
cagcagtatggtgcctcaccttggacg

SEQ ID NO: 65 - DNA, 363 bp, Artificial Sequence
  source: /note="Description of Artificial Sequence: Synthetic heavy chain variable region"
gaggtgcagctgttggagtctggaggtgaggtgaagaagcctggggcctcagtgaaggtctcctgcagggcctctggttacacctttagaaactatggcctcacctgggtgcggcaggcccccggacaagggcttgagtggatgggatggatcagcgcttacaatggaaacacaaactatgcacagaagttccagggcagagtcacactgaccacggacacatccacgagcacagcctacatggaactgaggagcctaagatctgacgacacggccgtgtatttctgtgcgagagacgtccccggccacggcgctgccttcatggacgtctggggcacagggaccacggtcaccgtctcctca

SEQ ID NO: 66 - protein, 121 aa, Artificial Sequence
  source: /note="Description of Artificial Sequence: Synthetic heavy chain variable region"
EVQLLESGGEVKKPGASVKVSCRASGYTFRNYGLTWVRQAPGQGLEWMGWISAYNGNTNYAQKFQGRVTLTTDTSTSTAYMELRSLRSDDTAVYFCARDVPGHGAAFMDVWGTGTTVTVSS

SEQ ID NO: 67 - protein, 9 aa, Artificial Sequence
  source: /note="Description of Artificial Sequence: Synthetic heavy chain variable region CDR H1"
YTFRNYGLT

SEQ ID NO: 68 - DNA, 27 bp, Artificial Sequence
  source: /note="Description of Artificial Sequence: Synthetic heavy chain variable region CDR H1"
tacacctttagaaactatggcctcacc

SEQ ID NO: 69 - protein, 17 aa, Artificial Sequence
  source: /note="Description of Artificial Sequence: Synthetic heavy chain variable region CDR H2"
WISAYNGNTNYAQKFQG

SEQ ID NO: 70 - DNA, 51 bp, Artificial Sequence
  source: /note="Description of Artificial Sequence: Synthetic heavy chain variable region CDR H2"
tggatcagcgcttacaatggaaacacaaactatgcacagaagttccagggc

SEQ ID NO: 71 - protein, 14 aa, Artificial Sequence
  source: /note="Description of Artificial Sequence: Synthetic heavy chain variable region CDR H3"
ARDVPGHGAAFMDV

SEQ ID NO: 72 - DNA, 42 bp, Artificial Sequence
  source: /note="Description of Artificial Sequence: Synthetic heavy chain variable region CDR H3"
gcgagagacgtccccggccacggcgctgccttcatggacgtc

SEQ ID NO: 73 - DNA, 336 bp, Artificial Sequence
  source: /note="Description of Artificial Sequence: Synthetic light chain variable region"
gacatccagttgacccagtctccactctccctgcccgtcacccttgggcagccggcctccatctcctgcaggtctagtcaaagcctcgaagccagtgatacaaatatctacttgagttggtttcagcagaggccaggccaatctccaaggcgcctaatttataagatttctaaccgagactctggggtcccagacagattcagcggcagtgggtcaggcactcatttcacactgagaatcagcagggtggaggctgacgatgttgcggtttattactgcatgcagggtacacactggcctccggcgttcggccaggggaccaaagtggatatcaaa

SEQ ID NO: 74 - protein, 112 aa, Artificial Sequence
  source: /note="Description of Artificial Sequence: Synthetic light chain variable region"
DIQLTQSPLSLPVTLGQPASISCRSSQSLEASDTNIYLSWFQQRPGQSPRRLIYKISNRDSGVPDRFSGSGSGTHFTLRISRVEADDVAVYYCMQGTHWPPAFGQGTKVDIK

SEQ ID NO: 75 - protein, 16 aa, Artificial Sequence
  source: /note="Description of Artificial Sequence: Synthetic light chain variable region CDR L1"
RSSQSLEASDTNIYLS

SEQ ID NO: 76 - DNA, 48 bp, Artificial Sequence
  source: /note="Description of Artificial Sequence: Synthetic light chain variable region CDR L1"
aggtctagtcaaagcctcgaagccagtgatacaaatatctacttgagt

SEQ ID NO: 77 - protein, 7 aa, Artificial Sequence
  source: /note="Description of Artificial Sequence: Synthetic light chain variable region CDR L2"
KISNRDS

SEQ ID NO: 78 - DNA, 21 bp, Artificial Sequence
  source: /note="Description of Artificial Sequence: Synthetic light chain variable region CDR L2"
aagatttctaaccgagactct

SEQ ID NO: 79 - protein, 9 aa, Artificial Sequence
  source: /note="Description of Artificial Sequence: Synthetic light chain variable region CDR L3"
MQGTHWPPA

SEQ ID NO: 80 - DNA, 27 bp, Artificial Sequence
  source: /note="Description of Artificial Sequence: Synthetic light chain variable region CDR L3"
atgcagggtacacactggcctccggcg

SEQ ID NO: 81 - DNA, 363 bp, Artificial Sequence
  source: /note="Description of Artificial Sequence: Synthetic heavy chain variable region"
caggtccagctggtacagtctggatctgaggtgaagaagcctggggccgcagtgaaggtctcctgcaaggcttctggttacatctttgccaactttggtgtcagctgggtgcgacaggcccctggacaagggcttgagtggatgggatggatcagcgcttacaatggtaacacaaactatgcacagaagttccagggcagagtcatcatgaccacagacacatccacgagcacagcctacatggagctgaggagcctgagatctgacgacacggccgtgtattattgtgcgagagacccccccgcctacgccgctacattgatggacgtctggggcaaagggaccacggtcactgtctcctca

SEQ ID NO: 82 - protein, 121 aa, Artificial Sequence
  source: /note="Description of Artificial Sequence: Synthetic heavy chain variable region"
QVQLVQSGSEVKKPGAAVKVSCKASGYIFANFGVSWVRQAPGQGLEWMGWISAYNGNTNYAQKFQGRVIMTTDTSTSTAYMELRSLRSDDTAVYYCARDPPAYAATLMDVWGKGTTVTVSS

SEQ ID NO: 83 - protein, 9 aa, Artificial Sequence
  source: /note="Description of Artificial Sequence: Synthetic heavy chain variable region CDR H1"
YIFANFGVS

SEQ ID NO: 84 - DNA, 27 bp, Artificial Sequence
  source: /note="Description of Artificial Sequence: Synthetic heavy chain variable region CDR H1"
tacatctttgccaactttggtgtcagc

SEQ ID NO: 85 - protein, 17 aa, Artificial Sequence
  source: /note="Description of Artificial Sequence: Synthetic heavy chain variable region CDR H2"
WISAYNGNTNYAQKFQG

SEQ ID NO: 86 - DNA, 51 bp, Artificial Sequence
  source: /note="Description of Artificial Sequence: Synthetic heavy chain variable region CDR H2"
tggatcagcgcttacaatggtaacacaaactatgcacagaagttccagggc

SEQ ID NO: 87 - protein, 14 aa, Artificial Sequence
  source: /note="Description of Artificial Sequence: Synthetic heavy chain variable region CDR H3"
ARDPPAYAATLMDV

SEQ ID NO: 88 - DNA, 42 bp, Artificial Sequence
  source: /note="Description of Artificial Sequence: Synthetic heavy chain variable region CDR H3"
gcgagagacccccccgcctacgccgctacattgatggacgtc

SEQ ID NO: 89 - DNA, 336 bp, Artificial Sequence
  source: /note="Description of Artificial Sequence: Synthetic light chain variable region"
gaaattgtattgacgcagtctccactctccctgcccgtcacccttggacagtcggcctccatctcctgcaggtctagtcaaagcctcgaacacagtgatacaaacacctacttgacttggtatcagcagaggccaggccaatctccaaggcggctactttataaggtttctaaccgggactctggggtcccagacagattcagcggcagtgggtcaggcactgatttcacactgaaaatcagcagggtggaggctgaggatgttggggtttattactgcatgcaaggtacacactggcctccgacgttcggccaagggaccaaagtggatatcaaa

SEQ ID NO: 90 - protein, 112 aa, Artificial Sequence
  source: /note="Description of Artificial Sequence: Synthetic light chain variable region"
EIVLTQSPLSLPVTLGQSASISCRSSQSLEHSDTNTYLTWYQQRPGQSPRRLLYKVSNRDSGVPDRFSGSGSGTDFTLKISRVEAEDVGVYYCMQGTHWPPTFGQGTKVDIK

SEQ ID NO: 91 - protein, 16 aa, Artificial Sequence
  source: /note="Description of Artificial Sequence: Synthetic light chain variable region CDR L1"
RSSQSLEHSDTNTYLT

SEQ ID NO: 92 - DNA, 48 bp, Artificial Sequence
  source: /note="Description of Artificial Sequence: Synthetic light chain variable region CDR L1"
aggtctagtcaaagcctcgaacacagtgatacaaacacctacttgact

SEQ ID NO: 93 - protein, 7 aa, Artificial Sequence
  source: /note="Description of Artificial Sequence: Synthetic light chain variable region CDR L2"
KVSNRDS

SEQ ID NO: 94 - DNA, 21 bp, Artificial Sequence
  source: /note="Description of Artificial Sequence: Synthetic light chain variable region CDR L2"
aaggtttctaaccgggactct

SEQ ID NO: 95 - protein, 9 aa, Artificial Sequence
  source: /note="Description of Artificial Sequence: Synthetic light chain variable region CDR L3"
MQGTHWPPT

SEQ ID NO: 96 - DNA, 27 bp, Artificial Sequence
  source: /note="Description of Artificial Sequence: Synthetic light chain variable region CDR L3"
atgcaaggtacacactggcctccgacg

SEQ ID NO: 97 - DNA, 375 bp, Artificial Sequence
  source: /note="Description of Artificial Sequence: Synthetic heavy chain variable region"
caggtccagcttgtacagtctggggctgaggtgaagaagcctgggtcctcggtgagggtctcctgcaaggcctctggaggcaccttcaggggctatggtctcagctgggtgcgacaggcccctggacagggactcgagtggatgggagggatcacccatctttttgggacagtcagctacgctccgaagttccagggcagactcacgatcaccgcggacgcatccacgggcacagcctacatggagctgagcagcctgatatctgaggacacggccgtatatttttgtgcgagagatgcttacgaagtgtggaccggctcttatctccccccttttgactactggggccagggaacaatggtcaccgtctcttca

SEQ ID NO: 98 - protein, 125 aa, Artificial Sequence
  source: /note="Description of Artificial Sequence: Synthetic heavy chain variable region"
QVQLVQSGAEVKKPGSSVRVSCKASGGTFRGYGLSWVRQAPGQGLEWMGGITHLFGTVSYAPKFQGRLTITADASTGTAYMELSSLISEDTAVYFCARDAYEVWTGSYLPPFDYWGQGTMVTVSS

SEQ ID NO: 99 - protein, 9 aa, Artificial Sequence
  source: /note="Description of Artificial Sequence: Synthetic heavy chain variable region CDR H1"
GTFRGYGLS

SEQ ID NO: 100 - DNA, 27 bp, Artificial Sequence
  source: /note="Description of Artificial Sequence: Synthetic heavy chain variable region CDR H1"
ggcaccttcaggggctatggtctcagc

SEQ ID NO: 101 - protein, 17 aa, Artificial Sequence
  source: /note="Description of Artificial Sequence: Synthetic heavy chain variable region CDR H2"
GITHLFGTVSYAPKFQG

SEQ ID NO: 102 - DNA, 51 bp, Artificial Sequence
  source: /note="Description of Artificial Sequence: Synthetic heavy chain variable region CDR H2"
gggatcacccatctttttgggacagtcagctacgctccgaagttccagggc

SEQ ID NO: 103 - protein, 18 aa, Artificial Sequence
  source: /note="Description of Artificial Sequence: Synthetic heavy chain variable region CDR H3"
ARDAYEVWTGSYLPPFDY

SEQ ID NO: 104 - DNA, 54 bp, Artificial Sequence
  source: /note="Description of Artificial Sequence: Synthetic heavy chain variable region CDR H3"
gcgagagatgcttacgaagtgtggaccggctcttatctccccccttttgactac

SEQ ID NO: 105 - DNA, 324 bp, Artificial Sequence
  source: /note="Description of Artificial Sequence: Synthetic light chain variable region"
gatattgtgatgactcagtctccaggcaccctgtctttgtctcccggggaaagagtcaccctctcctgcagggccagtcagattattccaagcagttacttagcctggtaccagcagaaacctggccaggctcccaggctcctcatctatggtgcattcaccagggccactgacatcccagacaggttcagtggcagtgggtctgggacagacttcactctcaccatcagcagactggagcctgaagattttgcagtatattattgtcagcagtatggtagttcatttctcactttcggcggagggaccaaggtggaaatcaaa

SEQ ID NO: 106 - protein, 108 aa, Artificial Sequence
  source: /note="Description of Artificial Sequence: Synthetic light chain variable region"
DIVMTQSPGTLSLSPGERVTLSCRASQIIPSSYLAWYQQKPGQAPRLLIYGAFTRATDIPDRFSGSGSGTDFTLTISRLEPEDFAVYYCQQYGSSFLTFGGGTKVEIK

SEQ ID NO: 107 - protein, 12 aa, Artificial Sequence
  source: /note="Description of Artificial Sequence: Synthetic light chain variable region CDR L1"
RASQIIPSSYLA

SEQ ID NO: 108 - DNA, 36 bp, Artificial Sequence
  source: /note="Description of Artificial Sequence: Synthetic light chain variable region CDR L1"
agggccagtcagattattccaagcagttacttagcc

SEQ ID NO: 109 - protein, 7 aa, Artificial Sequence
  source: /note="Description of Artificial Sequence: Synthetic light chain variable region CDR L2"
GAFTRAT

SEQ ID NO: 110 - DNA, 21 bp, Artificial Sequence
  source: /note="Description of Artificial Sequence: Synthetic light chain variable region CDR L2"
ggtgcattcaccagggccact

SEQ ID NO: 111 - protein, 9 aa, Artificial Sequence
  source: /note="Description of Artificial Sequence: Synthetic light chain variable region CDR L3"
QQYGSSFLT

SEQ ID NO: 112 - DNA, 27 bp, Artificial Sequence
  source: /note="Description of Artificial Sequence: Synthetic light chain variable region CDR L3"
cagcagtatggtagttcatttctcact

SEQ ID NO: 113 - DNA, 366 bp, Artificial Sequence
  source: /note="Description of Artificial Sequence: Synthetic heavy chain variable region"
caggtccagcttgtgcagtctgggcctgaggtaaagaagcctgggtcctcagtgacggtctcctgcaaggcttctggaggcaccttcagcaactatggtattgcttgggtgcgacaggcccctggacaagggcttgagtggatgggatcaacaatccctatccttggaacagcaagctacagacagagcttaaaggacagagtcacaattaccgcggacgcttccacgaccacagtctacatggaaatgactcgcctcagaactgaggacacggccgtctatttttgtgcgagagttccggagagtcttgtggcatcaaacgcttatgctgtttggggccaagggacggtggtcactgtctcctca

SEQ ID NO: 114 - protein, 122 aa, Artificial Sequence
  source: /note="Description of Artificial Sequence: Synthetic heavy chain variable region"
QVQLVQSGPEVKKPGSSVTVSCKASGGTFSNYGIAWVRQAPGQGLEWMGSTIPILGTASYRQSLKDRVTITADASTTTVYMEMTRLRTEDTAVYFCARVPESLVASNAYAVWGQGTVVTVSS

SEQ ID NO: 115 - protein, 9 aa, Artificial Sequence
  source: /note="Description of Artificial Sequence: Synthetic heavy chain variable region CDR H1"
GTFSNYGIA

SEQ ID NO: 116 - DNA, 27 bp, Artificial Sequence
  source: /note="Description of Artificial Sequence: Synthetic heavy chain variable region CDR H1"
ggcaccttcagcaactatggtattgct

SEQ ID NO: 117 - protein, 17 aa, Artificial Sequence
  source: /note="Description of Artificial Sequence: Synthetic heavy chain variable region CDR H2"
STIPILGTASYRQSLKD

SEQ ID NO: 118 - DNA, 51 bp, Artificial Sequence
  source: /note="Description of Artificial Sequence: Synthetic heavy chain variable region CDR H2"
tcaacaatccctatccttggaacagcaagctacagacagagcttaaaggac

SEQ ID NO: 119 - protein, 15 aa, Artificial Sequence
  source: /note="Description of Artificial Sequence: Synthetic heavy chain variable region CDR H3"
ARVPESLVASNAYAV

SEQ ID NO: 120 - DNA, 45 bp, Artificial Sequence
  source: /note="Description of Artificial Sequence: Synthetic heavy chain variable region CDR H3"
gcgagagttccggagagtcttgtggcatcaaacgcttatgctgtt

SEQ ID NO: 121 - DNA, 321 bp, Artificial Sequence
  source: /note="Description of Artificial Sequence: Synthetic light chain variable region"
gacatccagatgacccagtctccatcttccgtgtctgcatctgtaggagacagagtcaccatcacttgtcgggcgagccaggacattagcacctggttagcctggtatcagcagagaccagggaaagccccaaaactcctgatctacactgcatccagtttgcaaagtggggtcccatcaaggttcagcggcagtggatctgggacagagttcactctcaccatcagcagcctgcagcctgaagattttgcaacttactattgtcaacagggtaccagtttcccattcactttcggccctgggaccaagctggagatcaaa

SEQ ID NO: 122 - protein, 107 aa, Artificial Sequence
  source: /note="Description of Artificial Sequence: Synthetic light chain variable region"
DIQMTQSPSSVSASVGDRVTITCRASQDISTWLAWYQQRPGKAPKLLIYTASSLQSGVPSRFSGSGSGTEFTLTISSLQPEDFATYYCQQGTSFPFTFGPGTKLEIK

SEQ ID NO: 123 - protein, 11 aa, Artificial Sequence
  source: /note="Description of Artificial Sequence: Synthetic light chain variable region CDR L1"
RASQDISTWLA

SEQ ID NO: 124 - DNA, 33 bp, Artificial Sequence
  source: /note="Description of Artificial Sequence: Synthetic light chain variable region CDR L1"
cgggcgagccaggacattagcacctggttagcc

SEQ ID NO: 125 - protein, 7 aa, Artificial Sequence
  source: /note="Description of Artificial Sequence: Synthetic light chain variable region CDR L2"
TASSLQS

SEQ ID NO: 126 - DNA, 21 bp, Artificial Sequence
  source: /note="Description of Artificial Sequence: Synthetic light chain variable region CDR L2"
actgcatccagtttgcaaagt

SEQ ID NO: 127 - protein, 9 aa, Artificial Sequence
  source: /note="Description of Artificial Sequence: Synthetic light chain variable region CDR L3"
QQGTSFPFT

SEQ ID NO: 128 - DNA, 27 bp, Artificial Sequence
  source: /note="Description of Artificial Sequence: Synthetic light chain variable region CDR L3"
caacagggtaccagtttcccattcact

SEQ ID NO: 129 - DNA, 372 bp, Artificial Sequence
  source: /note="Description of Artificial Sequence: Synthetic heavy chain variable region"
gaggtgcagctggtggagtctggggctgagatgaagaagcctggggcctcagtgaaggtttcctgcaaggcttctggatacaccttcactaactatgctatacattgggtgcgccaggcccccggccaaagccttgagtggatgggatggatcaacgctggcaatggtaacacacaatattcacagaagttccagggcagagtcacctttaccagggacacatccgcgagcacggtctacatggacctgagcagcctgagatctgaagacacggctgtctattactgtgcgagaggccaaattgttgttataccacgtgctaatttctggttcgacccctggggccagggaaccctggtcaccgtctcctca

SEQ ID NO: 130 - protein, 124 aa, Artificial Sequence
  source: /note="Description of Artificial Sequence: Synthetic heavy chain variable region"
EVQLVESGAEMKKPGASVKVSCKASGYTFTNYAIHWVRQAPGQSLEWMGWINAGNGNTQYSQKFQGRVTFTRDTSASTVYMDLSSLRSEDTAVYYCARGQIVVIPRANFWFDPWGQGTLVTVSS

SEQ ID NO: 131 - protein, 9 aa, Artificial Sequence
  source: /note="Description of Artificial Sequence: Synthetic heavy chain variable region CDR H1"
YTFTNYAIH

SEQ ID NO: 132 - DNA, 27 bp, Artificial Sequence
  source: /note="Description of Artificial Sequence: Synthetic heavy chain variable region CDR H1"
tacaccttcactaactatgctatacat

SEQ ID NO: 133 - protein, 17 aa, Artificial Sequence
  source: /note="Description of Artificial Sequence: Synthetic heavy chain variable region CDR H2"
WINAGNGNTQYSQKFQG

SEQ ID NO: 134 - DNA, 51 bp, Artificial Sequence
  source: /note="Description of Artificial Sequence: Synthetic heavy chain variable region CDR H2"
tggatcaacgctggcaatggtaacacacaatattcacagaagttccagggc

SEQ ID NO: 135 - protein, 17 aa, Artificial Sequence
  source: /note="Description of Artificial Sequence: Synthetic heavy chain variable region CDR H3"
ARGQIVVIPRANFWFDP

SEQ ID NO: 136 - DNA, 51 bp, Artificial Sequence
  source: /note="Description of Artificial Sequence: Synthetic heavy chain variable region CDR H3"
gcgagaggccaaattgttgttataccacgtgctaatttctggttcgacccc

SEQ ID NO: 137 - DNA, 336 bp, Artificial Sequence
  source: /note="Description of Artificial Sequence: Synthetic light chain variable region"
gatattgtgctgacccagtctccactctccctgcccgtcacccctggagagccggcctccatctcctgcaggtctagtcagagcctcctgcatagtcatggatacaactatttggattggtacttgcagaagccagggcagtctccacagctcctgatctatttgggttctaatcgggcctccggggtccctgacaggttcagtggcagtggatcaggcacagattttacactgaaaatcagcagagtggaggctgaggatgttggggtttattactgcatgcaaactctacaaactccgatcaccttcggccaagggacacgaatggagattaaa

SEQ ID NO: 138 - protein, 112 aa, Artificial Sequence
  source: /note="Description of Artificial Sequence: Synthetic light chain variable region"
DIVLTQSPLSLPVTPGEPASISCRSSQSLLHSHGYNYLDWYLQKPGQSPQLLIYLGSNRASGVPDRFSGSGSGTDFTLKISRVEAEDVGVYYCMQTLQTPITFGQGTRMEIK

SEQ ID NO: 139 - protein, 16 aa, Artificial Sequence
  source: /note="Description of Artificial Sequence: Synthetic light chain variable region CDR L1"
RSSQSLLHSHGYNYLD

SEQ ID NO: 140 - DNA, 48 bp, Artificial Sequence
  source: /note="Description of Artificial Sequence: Synthetic light chain variable region CDR L1"
aggtctagtcagagcctcctgcatagtcatggatacaactatttggat

SEQ ID NO: 141 - protein, 7 aa, Artificial Sequence
  source: /note="Description of Artificial Sequence: Synthetic light chain variable region CDR L2"
LGSNRAS

SEQ ID NO: 142 - DNA, 21 bp, Artificial Sequence
  source: /note="Description of Artificial Sequence: Synthetic light chain variable region CDR L2"
ttgggttctaatcgggcctcc

SEQ ID NO: 143 - protein, 9 aa, Artificial Sequence
  source: /note="Description of Artificial Sequence: Synthetic light chain variable region CDR L3"
MQTLQTPIT

SEQ ID NO: 144 - DNA, 27 bp, Artificial Sequence
  source: /note="Description of Artificial Sequence: Synthetic light chain variable region CDR L3"
atgcaaactctacaaactccgatcacc

SEQ ID NO: 145 - DNA, 378 bp, Artificial Sequence
  source: /note="Description of Artificial Sequence: Synthetic heavy chain variable region"
gaggtgcagctgcaggagtcgggcccaggactggtgaagcctttacagaccctgtccgtcacctgcagtgtctctggtggctccatcagcagtggtgataactactggagctggatccgccagcgcccagggaagggcctggagtggattgggtacatctattacagtgggaccacctactacaatccgtccctcaagagtcgagttaccatatcagcagacaggtctaagaatcagttttctctgaagatgaattctctgagtgccgcggacacggccgtgtattactgtgcgagagatggcggatatgatcacatctgggggactcatcgttatttcgccctctggggccagggaaccctggtcaccgtctcctca

SEQ ID NO: 146 - protein, 126 aa, Artificial Sequence
  source: /note="Description of Artificial Sequence: Synthetic heavy chain variable region"
EVQLQESGPGLVKPLQTLSVTCSVSGGSISSGDNYWSWIRQRPGKGLEWIGYIYYSGTTYYNPSLKSRVTISADRSKNQFSLKMNSLSAADTAVYYCARDGGYDHIWGTHRYFALWGQGTLVTVSS

SEQ ID NO: 147 - protein, 11 aa, Artificial Sequence
  source: /note="Description of Artificial Sequence: Synthetic heavy chain variable region CDR H1"
GSISSGDNYWS

SEQ ID NO: 148 - DNA, 33 bp, Artificial Sequence
  source: /note="Description of Artificial Sequence: Synthetic heavy chain variable region CDR H1"
ggctccatcagcagtggtgataactactggagc

SEQ ID NO: 149 - protein, 16 aa, Artificial Sequence
  source: /note="Description of Artificial Sequence: Synthetic heavy chain variable region CDR H2"
YIYYSGTTYYNPSLKS

SEQ ID NO: 150 - DNA, 48 bp, Artificial Sequence
  source: /note="Description of Artificial Sequence: Synthetic heavy chain variable region CDR H2"
tacatctattacagtgggaccacctactacaatccgtccctcaagagt

SEQ ID NO: 151 - protein, 18 aa, Artificial Sequence
  source: /note="Description of Artificial Sequence: Synthetic heavy chain variable region CDR H3"
ARDGGYDHIWGTHRYFAL

SEQ ID NO: 152 - DNA, 54 bp, Artificial Sequence
  source: /note="Description of Artificial Sequence: Synthetic heavy chain variable region CDR H3"
gcgagagatggcggatatgatcacatctgggggactcatcgttatttcgccctc

SEQ ID NO: 153 - DNA, 324 bp, Artificial Sequence
  source: /note="Description of Artificial Sequence: Synthetic light chain variable region"
gaaacgacactcacgcagtctccaggcaccctgtctttgtctccaggggaaagagccaccctctcctgcagggccagtcagagtgttaacagcgactacttggcctggtaccagcagaaacttggccaggctcccaggctcctcatttatggtgtatccaacagggccactggcatcccagacaggtttactgggagtgggtctgggacagacttcactctcaccatcagcagactggagcctgaagattttgcagtctatcactgtcagcagtatggtacctcaccgtggacgttcggccaagggaccaaggtggagatcaaa

SEQ ID NO: 154 - protein, 108 aa, Artificial Sequence
  source: /note="Description of Artificial Sequence: Synthetic light chain variable region"
ETTLTQSPGTLSLSPGERATLSCRASQSVNSDYLAWYQQKLGQAPRLLIYGVSNRATGIPDRFTGSGSGTDFTLTISRLEPEDFAVYHCQQYGTSPWTFGQGTKVEIK

SEQ ID NO: 155 - protein, 12 aa, Artificial Sequence
  source: /note="Description of Artificial Sequence: Synthetic light chain variable region CDR L1"
RASQSVNSDYLA

SEQ ID NO: 156 - DNA, 36 bp, Artificial Sequence
  source: /note="Description of Artificial Sequence: Synthetic light chain variable region CDR L1"
agggccagtcagagtgttaacagcgactacttggcc

SEQ ID NO: 157 - protein, 7 aa, Artificial Sequence
  source: /note="Description of Artificial Sequence: Synthetic light chain variable region CDR L2"
GVSNRAT

SEQ ID NO: 158 - DNA, 21 bp, Artificial Sequence
  source: /note="Description of Artificial Sequence: Synthetic light chain variable region CDR L2"
ggtgtatccaacagggccact

SEQ ID NO: 159 - protein, 9 aa, Artificial Sequence
  source: /note="Description of Artificial Sequence: Synthetic light chain variable region CDR L3"
QQYGTSPWT

SEQ ID NO: 160 - DNA, 27 bp, Artificial Sequence
  source: /note="Description of Artificial Sequence: Synthetic light chain variable region CDR L3"
cagcagtatggtacctcaccgtggacg

SEQ ID NO: 161 - DNA, 375 bp, Artificial Sequence
  source: /note="Description of Artificial Sequence: Synthetic heavy chain variable region"
caggtccagcttgtacagtctggggctgaggtgaagaggcctgggtcctcggtgaaagtctcctgtaaggcctctggaggcaccttcagtagttatgctctctcctgggtacggcaggcccctggacaaggacttgagtggataggggggatcatccctatgcatcgtgtaacaaattacgcacagaaatttcggggcagagtcacaatttccgcggacacatccacgagtacggcctacttggaggtgaacagcctgagagttgaggacacggccatgtattactgtgcgagagtgtttttcggaacttgtggcggtgcttcgtgcttcccctctgacctctggggccagggaaccctggtcactgtctcctca

SEQ ID NO: 162 - protein, 125 aa, Artificial Sequence
  source: /note="Description of Artificial Sequence: Synthetic heavy chain variable region"
QVQLVQSGAEVKRPGSSVKVSCKASGGTFSSYALSWVRQAPGQGLEWIGGIIPMHRVTNYAQKFRGRVTISADTSTSTAYLEVNSLRVEDTAMYYCARVFFGTCGGASCFPSDLWGQGTLVTVSS

SEQ ID NO: 163 - protein, 9 aa, Artificial Sequence
  source: /note="Description of Artificial Sequence: Synthetic heavy chain variable region CDR H1"
GTFSSYALS

SEQ ID NO: 164 - DNA, 27 bp, Artificial Sequence
  source: /note="Description of Artificial Sequence: Synthetic heavy chain variable region CDR H1"
ggcaccttcagtagttatgctctctcc

SEQ ID NO: 165 - protein, 17 aa, Artificial Sequence
  source: /note="Description of Artificial Sequence: Synthetic heavy chain variable region CDR H2"
GIIPMHRVTNYAQKFRG

SEQ ID NO: 166 - DNA, 51 bp, Artificial Sequence
  source: /note="Description of Artificial Sequence: Synthetic heavy chain variable region CDR H2"
gggatcatccctatgcatcgtgtaacaaattacgcacagaaatttcggggc

SEQ ID NO: 167 - protein, 18 aa, Artificial Sequence
  source: /note="Description of Artificial Sequence: Synthetic heavy chain variable region CDR H3"
ARVFFGTCGGASCFPSDL

SEQ ID NO: 168 - DNA, 54 bp, Artificial Sequence
  source: /note="Description of Artificial Sequence: Synthetic heavy chain variable region CDR H3"
gcgagagtgtttttcggaacttgtggcggtgcttcgtgcttcccctctgacctc

SEQ ID NO: 169 - DNA, 321 bp, Artificial Sequence
  source: /note="Description of Artificial Sequence: Synthetic light chain variable region"
gaaattgtgttgacacagtctccatccttcgtgtctgcttctgtcggagacggggtcaccatcacttgccgggccagtcaggccattagcagttatttagcctggtatcagcaaaaaccagggcaagcccctaaactcctgatctatgctgcatccactttgcaaggtggtgtcccatcaaggttcagcggcagtggatctgggacacatttcactctcaccatcagcagcctgcagcctgaagattttgcaacttattactgtcagcaacttcatagtgattttcagactttcggccctgggaccaaggtggaaatcaaa

SEQ ID NO: 170 - protein, 107 aa, Artificial Sequence
  source: /note="Description of Artificial Sequence: Synthetic light chain variable region"
EIVLTQSPSFVSASVGDGVTITCRASQAISSYLAWYQQKPGQAPKLLIYAASTLQGGVPSRFSGSGSGTHFTLTISSLQPEDFATYYCQQLHSDFQTFGPGTKVEIK

SEQ ID NO: 171 - protein, 11 aa, Artificial Sequence
  source: /note="Description of Artificial Sequence: Synthetic light chain variable region CDR L1"
RASQAISSYLA

SEQ ID NO: 172 - DNA, 33 bp, Artificial Sequence
  source: /note="Description of Artificial Sequence: Synthetic light chain variable region CDR L1"
cgggccagtcaggccattagcagttatttagcc

SEQ ID NO: 173 - protein, 7 aa, Artificial Sequence
  source: /note="Description of Artificial Sequence: Synthetic light chain variable region CDR L2"
AASTLQG

SEQ ID NO: 174 - DNA, 21 bp, Artificial Sequence
  source: /note="Description of Artificial Sequence: Synthetic light chain variable region CDR L2"
gctgcatccactttgcaaggt

SEQ ID NO: 175 - protein, 9 aa, Artificial Sequence
  source: /note="Description of Artificial Sequence: Synthetic light chain variable region CDR L3"
QQLHSDFQT

SEQ ID NO: 176 - DNA, 27 bp, Artificial Sequence
  source: /note="Description of Artificial Sequence: Synthetic light chain variable region CDR L3"
cagcaacttcatagtgattttcagact

SEQ ID NO: 177 - DNA, 360 bp, Artificial Sequence
  source: /note="Description of Artificial Sequence: Synthetic heavy chain variable region"
caggtgcagctggtggaatctgggggaggcgtggtccagcctgggaggtccctgagactctcctgtgtagcgtctggattcagcttcagtatgcatggcatgcactgggtccgccaggctccaggcaaggggctggagtgggtgacagctatatggtatgatggaagtaataaatattatgcagactccgtgaagggccgattcacgatctccagagacaattctaggaacacgctgtatctgcaaatgaacagcctgagagccgaggacacggctgtgtattactgtgcgagagatcatgcctcaactccatactacatggacgtctggggcaaagggaccacggtcaccgtctcctca

SEQ ID NO: 178 - protein, 120 aa, Artificial Sequence
  source: /note="Description of Artificial Sequence: Synthetic heavy chain variable region"
QVQLVESGGGVVQPGRSLRLSCVASGFSFSMHGMHWVRQAPGKGLEWVTAIWYDGSNKYYADSVKGRFTISRDNSRNTLYLQMNSLRAEDTAVYYCARDHASTPYYMDVWGKGTTVTVSS

SEQ ID NO: 179 - protein, 9 aa, Artificial Sequence
  source: /note="Description of Artificial Sequence: Synthetic heavy chain variable region CDR H1"
FSFSMHGMH

SEQ ID NO: 180 - DNA, 27 bp, Artificial Sequence
  source: /note="Description of Artificial Sequence: Synthetic heavy chain variable region CDR H1"
ttcagcttcagtatgcatggcatgcac

SEQ ID NO: 181 - protein, 17 aa, Artificial Sequence
  source: /note="Description of Artificial Sequence: Synthetic heavy chain variable region CDR H2"
AIWYDGSNKYYADSVKG

SEQ ID NO: 182 - DNA, 51 bp, Artificial Sequence
  source: /note="Description of Artificial Sequence: Synthetic heavy chain variable region CDR H2"
gctatatggtatgatggaagtaataaatattatgcagactccgtgaagggc

SEQ ID NO: 183 - protein, 13 aa, Artificial Sequence
  source: /note="Description of Artificial Sequence: Synthetic heavy chain variable region CDR H3"
ARDHASTPYYMDV

SEQ ID NO: 184 - DNA, 39 bp, Artificial Sequence
  source: /note="Description of Artificial Sequence: Synthetic heavy chain variable region CDR H3"
gcgagagatcatgcctcaactccatactacatggacgtc

SEQ ID NO: 185 - DNA, 324 bp, Artificial Sequence
  source: /note="Description of Artificial Sequence: Synthetic light chain variable region"
gaaacgacactcacgcagtctccaggcaccctgtctttgtctccaggggaaagcgccaccctctcctgcaggaccagtcagaggattagcagcacctacttagcctggtaccggcagaaacctggccaggctcccaggctcctcatgtatggtgcatccagcagggccactggcatcccggacaggttcagtggcagtgggtctgggacagacttcactctcaccatcagcagtctggagcctgaagattttgcactatattactgtcagcagtatggtagctttccgtggacgttcggccaagggaccaagctggagatcaaa

SEQ ID NO: 186 - protein, 108 aa, Artificial Sequence
  source: /note="Description of Artificial Sequence: Synthetic light chain variable region"
ETTLTQSPGTLSLSPGESATLSCRTSQRISSTYLAWYRQKPGQAPRLLMYGASSRATGIPDRFSGSGSGTDFTLTISSLEPEDFALYYCQQYGSFPWTFGQGTKLEIK

SEQ ID NO: 187 - protein, 12 aa, Artificial Sequence
  source: /note="Description of Artificial Sequence: Synthetic light chain variable region CDR L1"
RTSQRISSTYLA

SEQ ID NO: 188 - DNA, 36 bp, Artificial Sequence
  source: /note="Description of Artificial Sequence: Synthetic light chain variable region CDR L1"
aggaccagtcagaggattagcagcacctacttagcc

SEQ ID NO: 189 - protein, 7 aa, Artificial Sequence
  source: /note="Description of Artificial Sequence: Synthetic light chain variable region CDR L2"
GASSRAT

SEQ ID NO: 190 - DNA, 21 bp, Artificial Sequence
  source: /note="Description of Artificial Sequence: Synthetic light chain variable region CDR L2"
ggtgcatccagcagggccact

SEQ ID NO: 191 - protein, 9 aa, Artificial Sequence
  source: /note="Description of Artificial Sequence: Synthetic light chain variable region CDR L3"
QQYGSFPWT

SEQ ID NO: 192 - DNA, 27 bp, Artificial Sequence
  source: /note="Description of Artificial Sequence: Synthetic light chain variable region CDR L3"
cagcagtatggtagctttccgtggacg

SEQ ID NO: 193 - DNA, 378 bp, Artificial Sequence
  source: /note="Description of Artificial Sequence: Synthetic heavy chain variable region"
caggtgcagctacagcagtggggcgcaggactgtggaagccttcgcagaccctgtccctcacctgcgctgtccatggtggatccctcagtggctactcttggagttggatccgccagtccccagggaggggactggagtggatcggcgaagtcaatcgtaggggaaccaccaactacaacccctccctcaagggtcgagtctccatatcctgggacacgtccaagaaccaggtctccctgtccctgaggtctgtgaccgccgcggacacggctacatattactgtgcggggaccaatgttggattcgttaatacccataacgactactacttcggtatggacgtctggggccaagggaccacggtcaccgtctcctca

SEQ ID NO: 194 - protein, 126 aa, Artificial Sequence
  source: /note="Description of Artificial Sequence: Synthetic heavy chain variable region"
QVQLQQWGAGLWKPSQTLSLTCAVHGGSLSGYSWSWIRQSPGRGLEWIGEVNRRGTTNYNPSLKGRVSISWDTSKNQVSLSLRSVTAADTATYYCAGTNVGFVNTHNDYYFGMDVWGQGTTVTVSS

SEQ ID NO: 195 - protein, 9 aa, Artificial Sequence
  source: /note="Description of Artificial Sequence: Synthetic heavy chain variable region CDR H1"
GSLSGYSWS

SEQ ID NO: 196 - DNA, 27 bp, Artificial Sequence
  source: /note="Description of Artificial Sequence: Synthetic heavy chain variable region CDR H1"
ggatccctcagtggctactcttggagt

SEQ ID NO: 197 - protein, 16 aa, Artificial Sequence
  source: /note="Description of Artificial Sequence: Synthetic heavy chain variable region CDR H2"
EVNRRGTTNYNPSLKG

SEQ ID NO: 198 - DNA, 48 bp, Artificial Sequence
  source: /note="Description of Artificial Sequence: Synthetic heavy chain variable region CDR H2"
gaagtcaatcgtaggggaaccaccaactacaacccctccctcaagggt

SEQ ID NO: 199 - protein, 20 aa, Artificial Sequence
  source: /note="Description of Artificial Sequence: Synthetic heavy chain variable region CDR H3"
AGTNVGFVNTHNDYYFGMDV

SEQ ID NO: 200 - DNA, 60 bp, Artificial Sequence
  source: /note="Description of Artificial Sequence: Synthetic heavy chain variable region CDR H3"
gcggggaccaatgttggattcgttaatacccataacgactactacttcggtatggacgtc

SEQ ID NO: 201 - DNA, 321 bp, Artificial Sequence
  source: /note="Description of Artificial Sequence: Synthetic light chain variable region"
gatattgtgatgactcagtctccatcctccctgtctgcatcggttggagacagagtcaccatcacttgccgggcaagtcagagcataagcaattatgtaaattggtatcagaaaaaaacaggtcaagtccctaaactcctgatctatggtgcatccaatttggaaagtggggtcccatcaaggttcagtggcggtggatctgggacagatttcactctcaccatcagcagtctgcaacctgaagattttgcaacttattactgtcaacagagttacagtgtcccgctcactttcggcggagggaccaaggtggaaatcaaa

SEQ ID NO: 202 - protein, 107 aa, Artificial Sequence
  source: /note="Description of Artificial Sequence: Synthetic light chain variable region"
DIVMTQSPSSLSASVGDRVTITCRASQSISNYVNWYQKKTGQVPKLLIYGASNLESGVPSRFSGGGSGTDFTLTISSLQPEDFATYYCQQSYSVPLTFGGGTKVEIK

SEQ ID NO: 203 - protein, 11 aa, Artificial Sequence
  source: /note="Description of Artificial Sequence: Synthetic light chain variable region CDR L1"
RASQSISNYVN

SEQ ID NO: 204 - DNA, 33 bp, Artificial Sequence
  source: /note="Description of Artificial Sequence: Synthetic light chain variable region CDR L1"
cgggcaagtcagagcataagcaattatgtaaat

SEQ ID NO: 205 - protein, 7 aa, Artificial Sequence
  source: /note="Description of Artificial Sequence: Synthetic light chain variable region CDR L2"
GASNLES

SEQ ID NO: 206 - DNA, 21 bp, Artificial Sequence
  source: /note="Description of Artificial Sequence: Synthetic light chain variable region CDR L2"
ggtgcatccaatttggaaagt

SEQ ID NO: 207 - protein, 9 aa, Artificial Sequence
  source: /note="Description of Artificial Sequence: Synthetic light chain variable region CDR L3"
QQSYSVPLT

SEQ ID NO: 208 - DNA, 27 bp, Artificial Sequence
  source: /note="Description of Artificial Sequence: Synthetic light chain variable region CDR L3"
caacagagttacagtgtcccgctcact

SEQ ID NO: 209 - DNA, 375 bp, Artificial Sequence
  source: /note="Description of Artificial Sequence: Synthetic heavy chain variable region"
caggtccagcttgtacagtctggggctgaggtgaagaggcctggatcctcggtgaaggtctcctgcaaggcgtctggaggcaccttccgcggctaccatatcagctggctgcgccaggcccctggacagggcctcgagtggctgggagggatcacccatttgtttgggacagttagttacgctccgaagttccagggcagagtcaccatcaccgcggacgcatccacgggcacactttacatggtgttgaacagcctgaaacctgaggacacggccatttattattgtgcgagagatgcttacgaggtgtggactggttcttatctccccccttttgactactggggccagggaaccctggtcaccgtctcctca

SEQ ID NO: 210 - protein, 125 aa, Artificial Sequence
  source: /note="Description of Artificial Sequence: Synthetic heavy chain variable region"
QVQLVQSGAEVKRPGSSVKVSCKASGGTFRGYHISWLRQAPGQGLEWLGGITHLFGTVSYAPKFQGRVTITADASTGTLYMVLNSLKPEDTAIYYCARDAYEVWTGSYLPPFDYWGQGTLVTVSS

SEQ ID NO: 211 - protein, 9 aa, Artificial Sequence
  source: /note="Description of Artificial Sequence: Synthetic heavy chain variable region CDR H1"
GTFRGYHIS

SEQ ID NO: 212 - DNA, 27 bp, Artificial Sequence
  source: /note="Description of Artificial Sequence: Synthetic heavy chain variable region CDR H1"
ggcaccttccgcggctaccatatcagc

SEQ ID NO: 213 - protein, 17 aa, Artificial Sequence
  source: /note="Description of Artificial Sequence: Synthetic heavy chain variable region CDR H2"
GITHLFGTVSYAPKFQG

SEQ ID NO: 214 - DNA, 51 bp, Artificial Sequence
  source: /note="Description of Artificial Sequence: Synthetic heavy chain variable region CDR H2"
gggatcacccatttgtttgggacagttagttacgctccgaagttccagggc

SEQ ID NO: 215 - protein, 18 aa, Artificial Sequence
  source: /note="Description of Artificial Sequence: Synthetic heavy chain variable region CDR H3"
ARDAYEVWTGSYLPPFDY

SEQ ID NO: 216 - DNA, 54 bp, Artificial Sequence
  source: /note="Description of Artificial Sequence: Synthetic heavy chain variable region CDR H3"
gcgagagatgcttacgaggtgtggactggttcttatctccccccttttgactac

SEQ ID NO: 217 - DNA, 324 bp, Artificial Sequence
  source: /note="Description of Artificial Sequence: Synthetic light chain variable region"
gaaacgacactcacgcagtctccaggcaccctgtctttgtctcccggggaaagagccaccctctcttgcagggccagtcagactgttacaagcaactacttagcctggtaccagcagaaacctggccaggctcccaggctcctcatctatgatgcactcaccagggccactggcatcccagacaggttcagtggcagtgggtctgggacagacttcactctcaccatcagcagactggagcctgaagattttgcactttattattgtcagcagtatggtagttcattcctcactttcggcggagggaccaaagtggatatcaaa

SEQ ID NO: 218 - protein, 108 aa, Artificial Sequence
  source: /note="Description of Artificial Sequence: Synthetic light chain variable region"
ETTLTQSPGTLSLSPGERATLSCRASQTVTSNYLAWYQQKPGQAPRLLIYDALTRATGIPDRFSGSGSGTDFTLTISRLEPEDFALYYCQQYGSSFLTFGGGTKVDIK

SEQ ID NO: 219 - protein, 12 aa, Artificial Sequence
  source: /note="Description of Artificial Sequence: Synthetic light chain variable region CDR L1"
RASQTVTSNYLA

SEQ ID NO: 220 - DNA, 36 bp, Artificial Sequence
  source: /note="Description of Artificial Sequence: Synthetic light chain variable region CDR L1"
agggccagtcagactgttacaagcaactacttagcc

SEQ ID NO: 221 - protein, 7 aa, Artificial Sequence
  source: /note="Description of Artificial Sequence: Synthetic light chain variable region CDR L2"
DALTRAT

SEQ ID NO: 222 - DNA, 21 bp, Artificial Sequence
  source: /note="Description of Artificial Sequence: Synthetic light chain variable region CDR L2"
gatgcactcaccagggccact

SEQ ID NO: 223 - protein, 9 aa, Artificial Sequence
  source: /note="Description of Artificial Sequence: Synthetic light chain variable region CDR L3"
QQYGSSFLT

SEQ ID NO: 224 - DNA, 27 bp, Artificial Sequence
  source: /note="Description of Artificial Sequence: Synthetic light chain variable region CDR L3"
cagcagtatggtagttcattcctcact

SEQ ID NO: 225 - DNA, 375 bp, Artificial Sequence
  source: /note="Description of Artificial Sequence: Synthetic heavy chain variable region"
caggtgcagctgcaggagtccggggctgaggtgaagaagcctgggtcctcggtgaaggtctcctgcaaggcttctggaggcgccttcagcagctatgctatcagctgggtgcgacaggcccctggacagggcctcgagtggctgggagggatcacccatttgtttgggacagttagttacgctccgaagttccagggcagagtcaccatcaccgcggacgcatccacgggcacactttacatggtgttgaacagcctgaaacctgaggacacggccatttattattgtgcgagagatgcttacgaggtgtggactggttcttatctccccccttttgactactggggccagggaaccctggtcaccgtctcctca

SEQ ID NO: 226 - protein, 125 aa, Artificial Sequence
  source: /note="Description of Artificial Sequence: Synthetic heavy chain variable region"
QVQLQESGAEVKKPGSSVKVSCKASGGAFSSYAISWVRQAPGQGLEWLGGITHLFGTVSYAPKFQGRVTITADASTGTLYMVLNSLKPEDTAIYYCARDAYEVWTGSYLPPFDYWGQGTLVTVSS

SEQ ID NO: 227 - protein, 9 aa, Artificial Sequence
  source: /note="Description of Artificial Sequence: Synthetic heavy chain variable region CDR H1"
GAFSSYAIS

SEQ ID NO: 228 - DNA, 27 bp, Artificial Sequence
  source: /note="Description of Artificial Sequence: Synthetic heavy chain variable region CDR H1"
ggcgccttcagcagctatgctatcagc

SEQ ID NO: 229 - protein, 17 aa, Artificial Sequence
  source: /note="Description of Artificial Sequence: Synthetic heavy chain variable region CDR H2"
GITHLFGTVSYAPKFQG

SEQ ID NO: 230 - DNA, 51 bp, Artificial Sequence; identical to SEQ ID NO: 214
  source: /note="Description of Artificial Sequence: Synthetic heavy chain variable region CDR H2"

SEQ ID NO: 231 - protein, 18 aa, Artificial Sequence
  source: /note="Description of Artificial Sequence: Synthetic heavy chain variable region CDR H3"
ARDAYEVWTGSYLPPFDY

SEQ ID NO: 232 - DNA, 54 bp, Artificial Sequence; identical to SEQ ID NO: 216
  source: /note="Description of Artificial Sequence: Synthetic heavy chain variable region CDR H3"

SEQ ID NO: 233 - DNA, 324 bp, Artificial Sequence
  source: /note="Description of Artificial Sequence: Synthetic light chain variable region"
gaaattgtattgacacagtctccaggcaccctgtctttgtctcccggggaaagagccaccctctcttgcagggccagtcagactgttacaagcaactacttagcctggtaccagcagaaacctggccaggctcccaggctcctcatctatgatgcactcaccagggccactggcatcccagacaggttcagtggcagtgggtctgggacagacttcactctcaccatcagcagactggagcctgaagattttgcactttattattgtcagcagtatggtagttcattcctcactttcggcggagggaccaagctggagatcaaa

SEQ ID NO: 234 - protein, 108 aa, Artificial Sequence
  source: /note="Description of Artificial Sequence: Synthetic light chain variable region"
EIVLTQSPGTLSLSPGERATLSCRASQTVTSNYLAWYQQKPGQAPRLLIYDALTRATGIPDRFSGSGSGTDFTLTISRLEPEDFALYYCQQYGSSFLTFGGGTKLEIK

SEQ ID NO: 235 - protein, 12 aa, Artificial Sequence
  source: /note="Description of Artificial Sequence: Synthetic light chain variable region CDR L1"
RASQTVTSNYLA

SEQ ID NO: 236 - DNA, 36 bp, Artificial Sequence; identical to SEQ ID NO: 220
  source: /note="Description of Artificial Sequence: Synthetic light chain variable region CDR L1"

SEQ ID NO: 237 - protein, 7 aa, Artificial Sequence
  source: /note="Description of Artificial Sequence: Synthetic light chain variable region CDR L2"
DALTRAT

SEQ ID NO: 238 - DNA, 21 bp, Artificial Sequence
  source: /note="Description of Artificial Sequence: Synthetic light chain variable region CDR L2"
gatgcactcaccagggccact

SEQ ID NO: 239 - protein, 9 aa, Artificial Sequence
  source: /note="Description of Artificial Sequence: Synthetic light chain variable region CDR L3"
QQYGSSFLT

SEQ ID NO: 240 - DNA, 27 bp, Artificial Sequence
  source: /note="Description of Artificial Sequence: Synthetic light chain variable region CDR L3"
cagcagtatggtagttcattcctcact

SEQ ID NO: 241 - DNA, 366 bp, Artificial Sequence
  source: /note="Description of Artificial Sequence: Synthetic heavy chain variable region"
caggtccagctggtacagtctggagctgaggtgaaggagcctggggcctcagtgagggtctcctgcaaggcttctggttacacctttaccagctatggtatcagctgggtgcgacaggcccctggacaagggcttgagtggatgggatggatcagcgcttacaatggtaacacaaactatgcacagaagttccagggcagagtcaccgtgaccacagacacatccacgagcgcagcctacatggagctgaggagcctgagatctgacgacacggccatttattactgtgcgagagattcattttcactgactggtgctggatttcctgactactggggccagggaaccctggtcaccgtctcctca

SEQ ID NO: 242 - protein, 122 aa, Artificial Sequence
  source: /note="Description of Artificial Sequence: Synthetic heavy chain variable region"
QVQLVQSGAEVKEPGASVRVSCKASGYTFTSYGISWVRQAPGQGLEWMGWISAYNGNTNYAQKFQGRVTVTTDTSTSAAYMELRSLRSDDTAIYYCARDSFSLTGAGFPDYWGQGTLVTVSS

SEQ ID NO: 243 - protein, 9 aa, Artificial Sequence
  source: /note="Description of Artificial Sequence: Synthetic heavy chain variable region CDR H1"
YTFTSYGIS

SEQ ID NO: 244 - DNA, 27 bp, Artificial Sequence
  source: /note="Description of Artificial Sequence: Synthetic heavy chain variable region CDR H1"
tacacctttaccagctatggtatcagc

SEQ ID NO: 245 - protein, 17 aa, Artificial Sequence
  source: /note="Description of Artificial Sequence: Synthetic heavy chain variable region CDR H2"
WISAYNGNTNYAQKFQG

SEQ ID NO: 246 - DNA, 51 bp, Artificial Sequence; identical to SEQ ID NO: 86
  source: /note="Description of Artificial Sequence: Synthetic heavy chain variable region CDR H2"

SEQ ID NO: 247 - protein, 15 aa, Artificial Sequence
  source: /note="Description of Artificial Sequence: Synthetic heavy chain variable region CDR H3"
ARDSFSLTGAGFPDY

SEQ ID NO: 248 - DNA, 45 bp, Artificial Sequence
  source: /note="Description of Artificial Sequence: Synthetic heavy chain variable region CDR H3"
gcgagagattcattttcactgactggtgctggatttcctgactac

SEQ ID NO: 249 - DNA, 336 bp, Artificial Sequence
  source: /note="Description of Artificial Sequence: Synthetic light chain variable region"
gaaattgtaatgacgcagtctccactctccctgcccgtcacccttggacagccggcctccatctcctgcaggtctagtcaaagcctcgtatacagtgatggaaacacctacttgaattggtttcagcagaggccaggccaatctccaaggcgcctaatttataaggtttctaaccgggactctggggtcccagacagattcagcggcagtgggtcagacactgatttcacactgaaaatcagcagggtggaggctgaggatgttggggtttattactgcatgcaagctacacagtggcctcgcacgttcggccaagggaccaaggtggaaatcaaa

SEQ ID NO: 250 - protein, 112 aa, Artificial Sequence
  source: /note="Description of Artificial Sequence: Synthetic light chain variable region"
EIVMTQSPLSLPVTLGQPASISCRSSQSLVYSDGNTYLNWFQQRPGQSPRRLIYKVSNRDSGVPDRFSGSGSDTDFTLKISRVEAEDVGVYYCMQATQWPRTFGQGTKVEIK

SEQ ID NO: 251 - protein, 16 aa, Artificial Sequence
  source: /note="Description of Artificial Sequence: Synthetic light chain variable region CDR L1"
RSSQSLVYSDGNTYLN

SEQ ID NO: 252 - DNA, 48 bp, Artificial Sequence
  source: /note="Description of Artificial Sequence: Synthetic light chain variable region CDR L1"
aggtctagtcaaagcctcgtatacagtgatggaaacacctacttgaat

SEQ ID NO: 253 - protein, 7 aa, Artificial Sequence
  source: /note="Description of Artificial Sequence: Synthetic light chain variable region CDR L2"
KVSNRDS

SEQ ID NO: 254 - DNA, 21 bp, Artificial Sequence
  source: /note="Description of Artificial Sequence: Synthetic light chain variable region CDR L2"
aaggtttctaaccgggactct

SEQ ID NO: 255 - protein, 9 aa, Artificial Sequence
  source: /note="Description of Artificial Sequence: Synthetic light chain variable region CDR L3"
MQATQWPRT

SEQ ID NO: 256 - DNA, 27 bp, Artificial Sequence
  source: /note="Description of Artificial Sequence: Synthetic light chain variable region CDR L3"
atgcaagctacacagtggcctcgcacg

SEQ ID NO: 257 - DNA, 360 bp, Artificial Sequence
  source: /note="Description of Artificial Sequence: Synthetic heavy chain variable region"
gaggtgcagctgttggagtctgggggaggcctggtcaagcctggggggtccctgagactctcctgtgtagcctctggattcaccttcagtagctataacatcaactgggtccgccaggctccagggaagggactggagtgggtctcatccattagtggtggtagtaattacatagactacgcagactcagtgaagggccgattcaccatctccagagacaacgccaagaactcactgtatttgcaaatgaacaacctgcgagccgaagacacggctgtgtattactgtgcgagacttggctatggtggtaacccggagcttgactattggggccagggaaccctggtcactgtctcctca

SEQ ID NO: 258 - protein, 120 aa, Artificial Sequence
  source: /note="Description of Artificial Sequence: Synthetic heavy chain variable region"
EVQLLESGGGLVKPGGSLRLSCVASGFTFSSYNINWVRQAPGKGLEWVSSISGGSNYIDYADSVKGRFTISRDNAKNSLYLQMNNLRAEDTAVYYCARLGYGGNPELDYWGQGTLVTVSS

SEQ ID NO: 259 - protein, 9 aa, Artificial Sequence
  source: /note="Description of Artificial Sequence: Synthetic heavy chain variable region CDR H1"
FTFSSYNIN

SEQ ID NO: 260 - DNA, 27 bp, Artificial Sequence
  source: /note="Description of Artificial Sequence: Synthetic heavy chain variable region CDR H1"
ttcaccttcagtagctataacatcaac

SEQ ID NO: 261 - protein, 17 aa, Artificial Sequence
  source: /note="Description of Artificial Sequence: Synthetic heavy chain variable region CDR H2"
SISGGSNYIDYADSVKG

SEQ ID NO: 262 - DNA, 51 bp, Artificial Sequence
  source: /note="Description of Artificial Sequence: Synthetic heavy chain variable region CDR H2"
tccattagtggtggtagtaattacatagactacgcagactcagtgaagggc

SEQ ID NO: 263 - protein, 13 aa, Artificial Sequence
  source: /note="Description of Artificial Sequence: Synthetic heavy chain variable region CDR H3"
ARLGYGGNPELDY

SEQ ID NO: 264 - DNA, 39 bp, Artificial Sequence
  source: /note="Description of Artificial Sequence: Synthetic heavy chain variable region CDR H3"
gcgagacttggctatggtggtaacccggagcttgactat

SEQ ID NO: 265 - DNA, 336 bp, Artificial Sequence
  source: /note="Description of Artificial Sequence: Synthetic light chain variable region"
cagtctgtgctgacgcagccgccctcagtgtctggggccccaggacagagggtcaccatctcctgcaccgggagcagctccaacatcggggcaggttatgatgtacactggtaccagcaacgtccaggaacagcccccaaactcctcatctatgctaataacaatcggccctcaggggtccctgaccgattctctggctccaagtctggcacctcagcctccctggccatcactgggctccaggctgaggatgaggctgattattactgccagtcctatgacctcagtctgagtagttcgagggtattcggcggagggaccaagctgaccgtcctc

SEQ ID NO: 266 - protein, 112 aa, Artificial Sequence
  source: /note="Description of Artificial Sequence: Synthetic light chain variable region"
QSVLTQPPSVSGAPGQRVTISCTGSSSNIGAGYDVHWYQQRPGTAPKLLIYANNNRPSGVPDRFSGSKSGTSASLAITGLQAEDEADYYCQSYDLSLSSSRVFGGGTKLTVL

SEQ ID NO: 267 - protein, 14 aa, Artificial Sequence
  source: /note="Description of Artificial Sequence: Synthetic light chain variable region CDR L1"
TGSSSNIGAGYDVH

SEQ ID NO: 268 - DNA, 42 bp, Artificial Sequence
  source: /note="Description of Artificial Sequence: Synthetic light chain variable region CDR L1"
accgggagcagctccaacatcggggcaggttatgatgtacac

SEQ ID NO: 269 - protein, 7 aa, Artificial Sequence
  source: /note="Description of Artificial Sequence: Synthetic light chain variable region CDR L2"
ANNNRPS

SEQ ID NO: 270 - DNA, 21 bp, Artificial Sequence
  source: /note="Description of Artificial Sequence: Synthetic light chain variable region CDR L2"
gctaataacaatcggccctca

SEQ ID NO: 271 - protein, 12 aa, Artificial Sequence
  source: /note="Description of Artificial Sequence: Synthetic light chain variable region CDR L3"
QSYDLSLSSSRV

SEQ ID NO: 272 - DNA, 36 bp, Artificial Sequence
  source: /note="Description of Artificial Sequence: Synthetic light chain variable region CDR L3"
cagtcctatgacctcagtctgagtagttcgagggta

SEQ ID NO: 273 - DNA, 366 bp, Artificial Sequence
  source: /note="Description of Artificial Sequence: Synthetic heavy chain variable region"
caggtccagctggtgcagtctgggggaggcgtggtccagcctgggaggtccctgaaacactcatgtgcagcctctggattcaccttcaataactatgctatacactgggtccgccaggctccaggcaagggcctggagtgggtggcagctatctcatatgatggaagcaatgaatactactcaaactccgtgaagggccgattcaccatctccagagacaattccaagtacacgctgtatctgcaaatgaacagcctgagacctgaggacacggctgtgtattactgtgcgagaggcgcctcctattactatgtgagtagtgaccttggctactggggccagggaaccctggtcaccgtctcctca

SEQ ID NO: 274 - protein, 122 aa, Artificial Sequence
  source: /note="Description of Artificial Sequence: Synthetic heavy chain variable region"
QVQLVQSGGGVVQPGRSLKHSCAASGFTFNNYAIHWVRQAPGKGLEWVAAISYDGSNEYYSNSVKGRFTISRDNSKYTLYLQMNSLRPEDTAVYYCARGASYYYVSSDLGYWGQGTLVTVSS

SEQ ID NO: 275 - protein, 9 aa, Artificial Sequence
  source: /note="Description of Artificial Sequence: Synthetic heavy chain variable region CDR H1"
FTFNNYAIH

SEQ ID NO: 276 - DNA, 27 bp, Artificial Sequence
  source: /note="Description of Artificial Sequence: Synthetic heavy chain variable region CDR H1"
ttcaccttcaataactatgctatacac

SEQ ID NO: 277 - protein, 17 aa, Artificial Sequence
  source: /note="Description of Artificial Sequence: Synthetic heavy chain variable region CDR H2"
AISYDGSNEYYSNSVKG

SEQ ID NO: 278 - DNA, 51 bp, Artificial Sequence
  source: /note="Description of Artificial Sequence: Synthetic heavy chain variable region CDR H2"
gctatctcatatgatggaagcaatgaatactactcaaactccgtgaagggc

SEQ ID NO: 279 - protein, 15 aa, Artificial Sequence
  source: /note="Description of Artificial Sequence: Synthetic heavy chain variable region CDR H3"
ARGASYYYVSSDLGY

SEQ ID NO: 280 - DNA, 45 bp, Artificial Sequence
  source: /note="Description of Artificial Sequence: Synthetic heavy chain variable region CDR H3"
gcgagaggcgcctcctattactatgtgagtagtgaccttggctac

SEQ ID NO: 281 - DNA, 333 bp, Artificial Sequence
  source: /note="Description of Artificial Sequence: Synthetic light chain variable region"
cagcctgtgctgactcagccgccctcagtgtctggggccccagggcagagggtcaccatctcctgcactgggagcagctccaacatcgggtcaggttatgatgtgcactggtatcagcagcttccaggaacagcccccaaagtcgtcatctatggtaacatcaatcggccctcaggggtccctgagcgattctctggctccaagtctggcacctcagcctccctggccatcactgggctccaggctgaggatgaggctgattattactgccagtcctatgacagcctgagtgcctcttgggtgttcggcggagggaccaagctcaccgtccta

SEQ ID NO: 282 - protein, 111 aa, Artificial Sequence
  source: /note="Description of Artificial Sequence: Synthetic light chain variable region"
QPVLTQPPSVSGAPGQRVTISCTGSSSNIGSGYDVHWYQQLPGTAPKVVIYGNINRPSGVPERFSGSKSGTSASLAITGLQAEDEADYYCQSYDSLSASWVFGGGTKLTVL

SEQ ID NO: 283 - protein, 14 aa, Artificial Sequence
  source: /note="Description of Artificial Sequence: Synthetic light chain variable region CDR L1"
TGSSSNIGSGYDVH

SEQ ID NO: 284 - DNA, 42 bp, Artificial Sequence
  source: /note="Description of Artificial Sequence: Synthetic light chain variable region CDR L1"
actgggagcagctccaacatcgggtcaggttatgatgtgcac

SEQ ID NO: 285 - protein, 7 aa, Artificial Sequence
  source: /note="Description of Artificial Sequence: Synthetic light chain variable region CDR L2"
GNINRPS

SEQ ID NO: 286 - DNA, 21 bp, Artificial Sequence
  source: /note="Description of Artificial Sequence: Synthetic light chain variable region CDR L2"
ggtaacatcaatcggccctca

SEQ ID NO: 287 - protein, 11 aa, Artificial Sequence
  source: /note="Description of Artificial Sequence: Synthetic light chain variable region CDR L3"
QSYDSLSASWV

SEQ ID NO: 288 - DNA, 33 bp, Artificial Sequence
  source: /note="Description of Artificial Sequence: Synthetic light chain variable region CDR L3"
cagtcctatgacagcctgagtgcctcttgggtg

SEQ ID NO: 289 - DNA, 348 bp, Artificial Sequence
  source: /note="Description of Artificial Sequence: Synthetic heavy chain variable region"
caggtccagcttgtgcagtctggaccagaggtgaaaaagaccagagagtctctgaagatctactgtaagggttctggatacagctttatcagccactggatcggctgggtgcgccagaaacccgggaaaggcctggagtggatggggatcatctatccgggtgactctgacaccagatacagcccgtccttccaaggccaggtcgccatctcagccgacaagtccatcaacaccgcctacctgcagtggagcagcctgaagtcctcggacaccgccatatattactgtgcgagtgtaatgcttcgggggattatgtggggccagggaaccctggtcaccgtctcctca

SEQ ID NO: 290 - protein, 116 aa, Artificial Sequence
  source: /note="Description of Artificial Sequence: Synthetic heavy chain variable region"
QVQLVQSGPEVKKTRESLKIYCKGSGYSFISHWIGWVRQKPGKGLEWMGIIYPGDSDTRYSPSFQGQVAISADKSINTAYLQWSSLKSSDTAIYYCASVMLRGIMWGQGTLVTVSS

SEQ ID NO: 291 - protein, 9 aa, Artificial Sequence
  source: /note="Description of Artificial Sequence: Synthetic heavy chain variable region CDR H1"
YSFISHWIG

SEQ ID NO: 292 - DNA, 27 bp, Artificial Sequence
  source: /note="Description of Artificial Sequence: Synthetic heavy chain variable region CDR H1"
tacagctttatcagccactggatcggc

SEQ ID NO: 293 - protein, 17 aa, Artificial Sequence
  source: /note="Description of Artificial Sequence: Synthetic heavy chain variable region CDR H2"
IIYPGDSDTRYSPSFQG

SEQ ID NO: 294 - DNA, 51 bp, Artificial Sequence
  source: /note="Description of Artificial Sequence: Synthetic heavy chain variable region CDR H2"
atcatctatccgggtgactctgacaccagatacagcccgtccttccaaggc

SEQ ID NO: 295 - protein, 9 aa, Artificial Sequence
  source: /note="Description of Artificial Sequence: Synthetic heavy chain variable region CDR H3"
ASVMLRGIM

SEQ ID NO: 296 - DNA, 27 bp, Artificial Sequence
  source: /note="Description of Artificial Sequence: Synthetic heavy chain variable region CDR H3"
gcgagtgtaatgcttcgggggattatg

SEQ ID NO: 297 - DNA, 327 bp, Artificial Sequence
  source: /note="Description of Artificial Sequence: Synthetic light chain variable region"
gacatccggttgacccagtctccatcctccctgtctgcatctgtaggagacagagtcaccatcacttgccaggcgagtcaggacattagcaagtatctaaattggtatcagcagaaaccagggaaagcccctaagctcctgatctacgatgcatccaatttggaaacaggggtcccatcaagattcagtggaagtggatctgggacagattttactttcaccatcagcagcctgcagcctgaagatattgcaacatattactgtcagccgtatgataatctccctccgccgctcactttcggcggagggaccaagctggagatcaaa

SEQ ID NO: 298 - protein, 109 aa, Artificial Sequence
  source: /note="Description of Artificial Sequence: Synthetic light chain variable region"
DIRLTQSPSSLSASVGDRVTITCQASQDISKYLNWYQQKPGKAPKLLIYDASNLETGVPSRFSGSGSGTDFTFTISSLQPEDIATYYCQPYDNLPPPLTFGGGTKLEIK

SEQ ID NO: 299 - protein, 11 aa, Artificial Sequence
  source: /note="Description of Artificial Sequence: Synthetic light chain variable region CDR L1"
QASQDISKYLN

SEQ ID NO: 300 - DNA, 33 bp, Artificial Sequence
  source: /note="Description of Artificial Sequence: Synthetic light chain variable region CDR L1"
caggcgagtcaggacattagcaagtatctaaat

SEQ ID NO: 301 - protein, 7 aa, Artificial Sequence
  source: /note="Description of Artificial Sequence: Synthetic light chain variable region CDR L2"
DASNLET

SEQ ID NO: 302 - DNA, 21 bp, Artificial Sequence
  source: /note="Description of Artificial Sequence: Synthetic light chain variable region CDR L2"
gatgcatccaatttggaaaca

SEQ ID NO: 303 - protein, 11 aa, Artificial Sequence
  source: /note="Description of Artificial Sequence: Synthetic light chain variable region CDR L3"
QPYDNLPPPLT

SEQ ID NO: 304 - DNA, 33 bp, Artificial Sequence
  source: /note="Description of Artificial Sequence: Synthetic light chain variable region CDR L3"
cagccgtatgataatctccctccgccgctcact

SEQ ID NO: 305 - DNA, 366 bp, Artificial Sequence
  source: /note="Description of Artificial Sequence: Synthetic heavy chain variable region"
gaggtgcagctgttggagtctgggggaggcgtggtccagtctgggaggtccctgagactctcctgtgcagcgtctggattcaccttcagtgacaatggcatgcactgggtccgccaggctccaggcaaggggctggagtgggtggcaggtatattttatgatggaagtaataaacaatatgcagactccgtgaagggccgattcaccatctccagagacaattccaagagcacgctgtatctgcaaatgaacagcctgagagccgaggacacggctgtgtattactgtgcgagagccccttacgatatttggagtggttattgtcttgactactggggccagggaaccctggtcaccgtctcctca

SEQ ID NO: 306 - protein, 122 aa, Artificial Sequence
  source: /note="Description of Artificial Sequence: Synthetic heavy chain variable region"
EVQLLESGGGVVQSGRSLRLSCAASGFTFSDNGMHWVRQAPGKGLEWVAGIFYDGSNKQYADSVKGRFTISRDNSKSTLYLQMNSLRAEDTAVYYCARAPYDIWSGYCLDYWGQGTLVTVSS

SEQ ID NO: 307 - protein, 9 aa, Artificial Sequence
  source: /note="Description of Artificial Sequence: Synthetic heavy chain variable region CDR H1"
FTFSDNGMH

SEQ ID NO: 308 - DNA, 27 bp, Artificial Sequence
  source: /note="Description of Artificial Sequence: Synthetic heavy chain variable region CDR H1"
ttcaccttcagtgacaatggcatgcac

SEQ ID NO: 309 - protein, 17 aa, Artificial Sequence
  source: /note="Description of Artificial Sequence: Synthetic heavy chain variable region CDR H2"
GIFYDGSNKQYADSVKG

SEQ ID NO: 310 - DNA, 51 bp, Artificial Sequence
  source: /note="Description of Artificial Sequence: Synthetic heavy chain variable region CDR H2"
ggtatattttatgatggaagtaataaacaatatgcagactccgtgaagggc

SEQ ID NO: 311 - protein, 15 aa, Artificial Sequence
  source: /note="Description of Artificial Sequence: Synthetic heavy chain variable region CDR H3"
ARAPYDIWSGYCLDY

SEQ ID NO: 312 - DNA, 45 bp, Artificial Sequence
  source: /note="Description of Artificial Sequence: Synthetic heavy chain variable region CDR H3"
gcgagagccccttacgatatttggagtggttattgtcttgactac

SEQ ID NO: 313 - DNA, 321 bp, Artificial Sequence
  source: /note="Description of Artificial Sequence: Synthetic light chain variable region"
gacatccagatgactcagactccagccaccctgtctatgtctccaggggaaagagccaccctctcctgcagggccagtcagagtgttaacaacaacttagcctggtaccagcagagacctggccaggctcccaggctcctcatctatggtgcatctaccagggccactggtatcccagccaggttcagtggcagtgggtctgagacagagttcactctcactatcagcagcctgcagtctgaagattttgcggtttatcactgtcagcagtatagtatctggcctcagacttttggccaggggaccaagctggagatcaaa

SEQ ID NO: 314 - protein, 107 aa, Artificial Sequence
  source: /note="Description of Artificial Sequence: Synthetic light chain variable region"
DIQMTQTPATLSMSPGERATLSCRASQSVNNNLAWYQQRPGQAPRLLIYGASTRATGIPARFSGSGSETEFTLTISSLQSEDFAVYHCQQYSIWPQTFGQGTKLEIK

SEQ ID NO: 315 - protein, 11 aa, Artificial Sequence
  source: /note="Description of Artificial Sequence: Synthetic light chain variable region CDR L1"
RASQSVNNNLA

SEQ ID NO: 316 - DNA, 33 bp, Artificial Sequence
  source: /note="Description of Artificial Sequence: Synthetic light chain variable region CDR L1"
agggccagtcagagtgttaacaacaacttagcc

SEQ ID NO: 317 - protein, 7 aa, Artificial Sequence
  source: /note="Description of Artificial Sequence: Synthetic light chain variable region CDR L2"
GASTRAT

SEQ ID NO: 318 - DNA, 21 bp, Artificial Sequence
  source: /note="Description of Artificial Sequence: Synthetic light chain variable region CDR L2"
ggtgcatctaccagggccact

SEQ ID NO: 319 - protein, 9 aa, Artificial Sequence
  source: /note="Description of Artificial Sequence: Synthetic light chain variable region CDR L3"
QQYSIWPQT

SEQ ID NO: 320 - DNA, 27 bp, Artificial Sequence
  source: /note="Description of Artificial Sequence: Synthetic light chain variable region CDR L3"
cagcagtatagtatctggcctcagact

SEQ ID NO: 321 - DNA, 384 bp, Artificial Sequence
  source: /note="Description of Artificial Sequence: Synthetic heavy chain variable region"
gaggtgcagctggtggagtctgggggaggcttggtccagcctggggggtccctgagactctcctgtgcagcctctggattcactattggaacgtactggatgagctgggtccgccaggctccagggaaggggctggagtgggtggccaacataaaaccagatggaagtgagcaatattatggggactcggtgaagggccgattcaccatctccagagacaacgccaagaattccctgtatctgcaaatgcacagcctgagagccgaggacgcggctgtcttttactgtgcgagggatactcccgacgtattacgacatttggagtggccccctgtaggtgcttttgatatctggggccaagggaccacggtcaccgtctcctca

SEQ ID NO: 322 - protein, 128 aa, Artificial Sequence
  source: /note="Description of Artificial Sequence: Synthetic heavy chain variable region"
EVQLVESGGGLVQPGGSLRLSCAASGFTIGTYWMSWVRQAPGKGLEWVANIKPDGSEQYYGDSVKGRFTISRDNAKNSLYLQMHSLRAEDAAVFYCARDTPDVLRHLEWPPVGAFDIWGQGTTVTVSS

SEQ ID NO: 323 - protein, 9 aa, Artificial Sequence
  source: /note="Description of Artificial Sequence: Synthetic heavy chain variable region CDR H1"
FTIGTYWMS

SEQ ID NO: 324 - DNA, 27 bp, Artificial Sequence
  source: /note="Description of Artificial Sequence: Synthetic heavy chain variable region CDR H1"
ttcactattggaacgtactggatgagc

SEQ ID NO: 325 - protein, 17 aa, Artificial Sequence
  source: /note="Description of Artificial Sequence: Synthetic heavy chain variable region CDR H2"
NIKPDGSEQYYGDSVKG

SEQ ID NO: 326 - DNA, 51 bp, Artificial Sequence
  source: /note="Description of Artificial Sequence: Synthetic heavy chain variable region CDR H2"
aacataaaaccagatggaagtgagcaatattatggggactcggtgaagggc

SEQ ID NO: 327 - protein, 21 aa, Artificial Sequence
  source: /note="Description of Artificial Sequence: Synthetic heavy chain variable region CDR H3"
ARDTPDVLRHLEWPPVGAFDI

SEQ ID NO: 328 - DNA, 63 bp, Artificial Sequence
  source: /note="Description of Artificial Sequence: Synthetic heavy chain variable region CDR H3"
gcgagggatactcccgacgtattacgacatttggagtggccccctgtaggtgcttttgatatc

SEQ ID NO: 329 - DNA, 339 bp, Artificial Sequence
  source: /note="Description of Artificial Sequence: Synthetic light chain variable region"
gaaattgtaatgacgcagtctccagactccctggctgtgtctctgggcgagagggccaccatcaactgcaagtccagccagagtcttttctacagctccaccaatcagcactacttggcttggtaccagcagaaaccaggacagcctcctgagctgctcatttactgggcatctatccgggaatccggggtccctgaccgattcagtggcagcgggtctgggacagatttcactctcaccatcagcagcctgcaggccgcagatgtggcagtttattactgtcagcagtattatagtagtcctcaaacttttggccaggggaccaaggtggaaatcaaa

SEQ ID NO: 330 - protein, 113 aa, Artificial Sequence
  source: /note="Description of Artificial Sequence: Synthetic light chain variable region"
EIVMTQSPDSLAVSLGERATINCKSSQSLFYSSTNQHYLAWYQQKPGQPPELLIYWASIRESGVPDRFSGSGSGTDFTLTISSLQAADVAVYYCQQYYSSPQTFGQGTKVEIK

SEQ ID NO: 331 - protein, 17 aa, Artificial Sequence
  source: /note="Description of Artificial Sequence: Synthetic light chain variable region CDR L1"
KSSQSLFYSSTNQHYLA

SEQ ID NO: 332 - DNA, 51 bp, Artificial Sequence
  source: /note="Description of Artificial Sequence: Synthetic light chain variable region CDR L1"
aagtccagccagagtcttttctacagctccaccaatcagcactacttggct

SEQ ID NO: 333 - protein, 7 aa, Artificial Sequence
  source: /note="Description of Artificial Sequence: Synthetic light chain variable region CDR L2"
WASIRES

SEQ ID NO: 334 - DNA, 21 bp, Artificial Sequence
  source: /note="Description of Artificial Sequence: Synthetic light chain variable region CDR L2"
tgggcatctatccgggaatcc

SEQ ID NO: 335 - protein, 9 aa, Artificial Sequence
  source: /note="Description of Artificial Sequence: Synthetic light chain variable region CDR L3"
QQYYSSPQT

SEQ ID NO: 336 - DNA, 27 bp, Artificial Sequence
  source: /note="Description of Artificial Sequence: Synthetic light chain variable region CDR L3"
cagcagtattatagtagtcctcaaact

SEQ ID NO: 337 - DNA, 363 bp, Artificial Sequence
  source: /note="Description of Artificial Sequence: Synthetic heavy chain variable region"
caggtccagcttgtgcagtctggaactgaggtgaagaagcctggggcctcagtgaaggtctcctgtaaggctgctggttacacctttagcaactacggtgtcagttgggtgcgacaggcccctggacaggggcttgagtggatgggatggatcagcgcttataatggtaacacaaaatttgcacagaaggtccagggcagactcaccatgaccacagacacatctaccagcacagcctacatggaattgaggaacctcagatctgacgacacggccgtgtattattgtgcgagagaatcaggggcaacagcggctgctatgtttgactactggggccagggaaccctggtcaccgtctcctca

SEQ ID NO: 338 - protein, 121 aa, Artificial Sequence; identical to SEQ ID NO: 34
  source: /note="Description of Artificial Sequence: Synthetic heavy chain variable region"

SEQ ID NO: 339 - protein, 9 aa, Artificial Sequence
  source: /note="Description of Artificial Sequence: Synthetic heavy chain variable region CDR H1"
YTFSNYGVS

SEQ ID NO: 340 - DNA, 27 bp, Artificial Sequence
  source: /note="Description of Artificial Sequence: Synthetic heavy chain variable region CDR H1"
tacacctttagcaactacggtgtcagt

SEQ ID NO: 341 - protein, 17 aa, Artificial Sequence
  source: /note="Description of Artificial Sequence: Synthetic heavy chain variable region CDR H2"
WISAYNGNTKFAQKVQG

SEQ ID NO: 342 - DNA, 51 bp, Artificial Sequence; identical to SEQ ID NO: 38
  source: /note="Description of Artificial Sequence: Synthetic heavy chain variable region CDR H2"

SEQ ID NO: 343 - protein, 14 aa, Artificial Sequence
  source: /note="Description of Artificial Sequence: Synthetic heavy chain variable region CDR H3"
ARESGATAAAMFDY

SEQ ID NO: 344 - DNA, 42 bp, Artificial Sequence; identical to SEQ ID NO: 40
  source: /note="Description of Artificial Sequence: Synthetic heavy chain variable region CDR H3"

SEQ ID NO: 345 - DNA, 336 bp, Artificial Sequence
  source: /note="Description of Artificial Sequence: Synthetic light chain variable region"
gaaattgtattgacgcagtctccactctccctgcccgtcacccttggacagccggcctccatctcctgcaggtctagtcaaagcctcgaatacagtgatggaaacatctacttgagttggtttcaacagaggccaggccaatctccaaggcgcctaatttataaggtttctcaccgggactctggggtcccagacagattcagcggcagtgggtcaggcactgatttcacactgaaaatcgccagggtggaggctgaggatgttgcagtttattactgcatgcaagctatacactggcctcgaacttttggccaggggaccaaggtggagatcaaa

SEQ ID NO: 346 - protein, 112 aa, Artificial Sequence
  source: /note="Description of Artificial Sequence: Synthetic light chain variable region"
EIVLTQSPLSLPVTLGQPASISCRSSQSLEYSDGNIYLSWFQQRPGQSPRRLIYKVSHRDSGVPDRFSGSGSGTDFTLKIARVEAEDVAVYYCMQAIHWPRTFGQGTKVEIK

SEQ ID NO: 347 - protein, 16 aa, Artificial Sequence
  source: /note="Description of Artificial Sequence: Synthetic light chain variable region CDR L1"
RSSQSLEYSDGNIYLS

SEQ ID NO: 348 - DNA, 48 bp, Artificial Sequence; identical to SEQ ID NO: 44
  source: /note="Description of Artificial Sequence: Synthetic light chain variable region CDR L1"

SEQ ID NO: 349 - protein, 7 aa, Artificial Sequence
  source: /note="Description of Artificial Sequence: Synthetic light chain variable region CDR L2"
KVSHRDS

SEQ ID NO: 350 - DNA, 21 bp, Artificial Sequence
  source: /note="Description of Artificial Sequence: Synthetic light chain variable region CDR L2"
aaggtttctcaccgggactct

SEQ ID NO: 351 - protein, 9 aa, Artificial Sequence
  source: /note="Description of Artificial Sequence: Synthetic light chain variable region CDR L3"
MQAIHWPRT

SEQ ID NO: 352 - DNA, 27 bp, Artificial Sequence
  source: /note="Description of Artificial Sequence: Synthetic light chain variable region CDR L3"
atgcaagctatacactggcctcgaact

SEQ ID NO: 353 - DNA, 366 bp, Artificial Sequence
  source: /note="Description of Artificial Sequence: Synthetic heavy chain variable region"
gaggtgcagctggtggagtctgggggaggcgtggtccagtctgggaggtccctgagactctcctgtgcagcgtctggattcaccttcagtgacaatggcatgcactgggtccgccaggctccaggcaaggggctggagtgggtggcaggtatattttatgatggaagtaataaacaatatgcagactccgtgaagggccgattcaccatctccagagacaattccaagagcacgctgtatctgcaaatgaacagcctgagagccgaggacacggctgtgtattactgtgcgagagccccttacgatatttggagtggttattgtcttgactactggggccagggaaccctggtcaccgtctcctca

SEQ ID NO: 354 - protein, 122 aa, Artificial Sequence
  source: /note="Description of Artificial Sequence: Synthetic heavy chain variable region"
EVQLVESGGGVVQSGRSLRLSCAASGFTFSDNGMHWVRQAPGKGLEWVAGIFYDGSNKQYADSVKGRFTISRDNSKSTLYLQMNSLRAEDTAVYYCARAPYDIWSGYCLDYWGQGTLVTVSS

SEQ ID NO: 355 - protein, 9 aa, Artificial Sequence
  source: /note="Description of Artificial Sequence: Synthetic heavy chain variable region CDR H1"
FTFSDNGMH

SEQ ID NO: 356 - DNA, 27 bp, Artificial Sequence
  source: /note="Description of Artificial Sequence: Synthetic heavy chain variable region CDR H1"
ttcaccttcagtgacaatggcatgcac

SEQ ID NO: 357 - protein, 17 aa, Artificial Sequence
  source: /note="Description of Artificial Sequence: Synthetic heavy chain variable region CDR H2"
GIFYDGSNKQYADSVKG

SEQ ID NO: 358 - DNA, 51 bp, Artificial Sequence; identical to SEQ ID NO: 310
  source: /note="Description of Artificial Sequence: Synthetic heavy chain variable region CDR H2"

SEQ ID NO: 359 - protein, 15 aa, Artificial Sequence
  source: /note="Description of Artificial Sequence: Synthetic heavy chain variable region CDR H3"
ARAPYDIWSGYCLDY

SEQ ID NO: 360 - DNA, 45 bp, Artificial Sequence; identical to SEQ ID NO: 312
  source: /note="Description of Artificial Sequence: Synthetic heavy chain variable region CDR H3"

SEQ ID NO: 361 - DNA, 321 bp, Artificial Sequence
  source: /note="Description of Artificial Sequence: Synthetic light chain variable region"
gacatccggttgacccagtctccagccaccctgtctatgtctccaggggaaagagccaccctctcctgcagggccagtcagagtgttaacaacaacttagcctggtaccagcagagacctggccaggctcccaggctcctcatctatggtgcatctaccagggccactggtatcccagccaggttcagtggcagtgggtctgagacagagttcactctcactatcagcagcctgcagtctgaagattttgcggtttatcactgtcagcagtatagtatctggcctcagacttttggccaggggaccaaagtggatatcaaa

SEQ ID NO: 362 - protein, 107 aa, Artificial Sequence
  source: /note="Description of Artificial Sequence: Synthetic light chain variable region"
DIRLTQSPATLSMSPGERATLSCRASQSVNNNLAWYQQRPGQAPRLLIYGASTRATGIPARFSGSGSETEFTLTISSLQSEDFAVYHCQQYSIWPQTFGQGTKVDIK

SEQ ID NO: 363 - protein, 11 aa, Artificial Sequence
  source: /note="Description of Artificial Sequence: Synthetic light chain variable region CDR L1"
RASQSVNNNLA

SEQ ID NO: 364 - DNA, 33 bp, Artificial Sequence; identical to SEQ ID NO: 316
  source: /note="Description of Artificial Sequence: Synthetic light chain variable region CDR L1"

SEQ ID NO: 365 - protein, 7 aa, Artificial Sequence
  source: /note="Description of Artificial Sequence: Synthetic light chain variable region CDR L2"
GASTRAT

SEQ ID NO: 366 - DNA, 21 bp, Artificial Sequence
  source: /note="Description of Artificial Sequence: Synthetic light chain variable region CDR L2"
ggtgcatctaccagggccact

SEQ ID NO: 367 - protein, 9 aa, Artificial Sequence
  source: /note="Description of Artificial Sequence: Synthetic light chain variable region CDR L3"
QQYSIWPQT

SEQ ID NO: 368 - DNA, 27 bp, Artificial Sequence
  source: /note="Description of Artificial Sequence: Synthetic light chain variable region CDR L3"
cagcagtatagtatctggcctcagact

SEQ ID NO: 369 - DNA, 366 bp, Artificial Sequence
  source: /note="Description of Artificial Sequence: Synthetic heavy chain variable region"
gaggtgcagctgttggagtctgggggagccttggtcgagcctggggggtccctgagactctcctgtgcagcctctggattctcctttaacacgtattccatgaactgggtccgccagggtccagggaagggactggagtgggtcgcaacgataagtacgagtactgctggctcatactacgcagactccgtgaggggccggttcaccatctctagagacaattccaagaacacgttatatctgcaaatgaacagtctgagagtcgaagacacggccgtatattactgtgcgagagatcaggaagtggaactgatcgatgatgcttttgatttctggggccgggggacaatggtcaccgtctcttca

SEQ ID NO: 370 - protein, 122 aa, Artificial Sequence
  source: /note="Description of Artificial Sequence: Synthetic heavy chain variable region"
EVQLLESGGALVEPGGSLRLSCAASGFSFNTYSMNWVRQGPGKGLEWVATISTSTAGSYYADSVRGRFTISRDNSKNTLYLQMNSLRVEDTAVYYCARDQEVELIDDAFDFWGRGTMVTVSS

SEQ ID NO: 371 - protein, 9 aa, Artificial Sequence
  source: /note="Description of Artificial Sequence: Synthetic heavy chain variable region CDR H1"
FSFNTYSMN

SEQ ID NO: 372 - DNA, 27 bp, Artificial Sequence
  source: /note="Description of Artificial Sequence: Synthetic heavy chain variable region CDR H1"
ttctcctttaacacgtattccatgaac

SEQ ID NO: 373 - protein, 17 aa, Artificial Sequence
  source: /note="Description of Artificial Sequence: Synthetic heavy chain variable region CDR H2"
TISTSTAGSYYADSVRG

SEQ ID NO: 374 - DNA, 51 bp, Artificial Sequence
  source: /note="Description of Artificial Sequence: Synthetic heavy chain variable region CDR H2"
acgataagtacgagtactgctggctcatactacgcagactccgtgaggggc

SEQ ID NO: 375 - protein, 15 aa, Artificial Sequence
  source: /note="Description of Artificial Sequence: Synthetic heavy chain variable region CDR H3"
ARDQEVELIDDAFDF

SEQ ID NO: 376 - DNA, 45 bp, Artificial Sequence
  source: /note="Description of Artificial Sequence: Synthetic heavy chain variable region CDR H3"
gcgagagatcaggaagtggaactgatcgatgatgcttttgatttc

SEQ ID NO: 377 - DNA, 318 bp, Artificial Sequence
  source: /note="Description of Artificial Sequence: Synthetic light chain variable region"
gatattgtgatgactcagacacattcctccctgtctgcatctgtgggagacagagtcaccatcacttgccgggccagtcagagtattagtatctgggtggcctggtatcagcagaaaccagggaaagcccctaacctcctgatctataaggcgtctagtttacaaagtggggtcccatcaaggttcagcggcagtggatctgggacagaattcactctcaccatcagcagcctgcagcctgatgactctgcaacttattactgccaacagtattacacctattacagttttggccaggggaccaagctggagatcaaa

SEQ ID NO: 378 - protein, 106 aa, Artificial Sequence
  source: /note="Description of Artificial Sequence: Synthetic light chain variable region"
DIVMTQTHSSLSASVGDRVTITCRASQSISIWVAWYQQKPGKAPNLLIYKASSLQSGVPSRFSGSGSGTEFTLTISSLQPDDSATYYCQQYYTYYSFGQGTKLEIK

SEQ ID NO: 379 - protein, 11 aa, Artificial Sequence
  source: /note="Description of Artificial Sequence: Synthetic light chain variable region CDR L1"
RASQSISIWVA

SEQ ID NO: 380 - DNA, 33 bp, Artificial Sequence
  source: /note="Description of Artificial Sequence: Synthetic light chain variable region CDR L1"
cgggccagtcagagtattagtatctgggtggcc

SEQ ID NO: 381 - protein, 7 aa, Artificial Sequence
  source: /note="Description of Artificial Sequence: Synthetic light chain variable region CDR L2"
KASSLQS

SEQ ID NO: 382 - DNA, 21 bp, Artificial Sequence
  source: /note="Description of Artificial Sequence: Synthetic light chain variable region CDR L2"
aaggcgtctagtttacaaagt

SEQ ID NO: 383 - protein, 8 aa, Artificial Sequence
  source: /note="Description of Artificial Sequence: Synthetic light chain variable region CDR L3"
QQYYTYYS

SEQ ID NO: 384 - DNA, 24 bp, Artificial Sequence
  source: /note="Description of Artificial Sequence: Synthetic light chain variable region CDR L3"
caacagtattacacctattacagt

SEQ ID NO: 385 - DNA, 363 bp, Artificial Sequence
  source: /note="Description of Artificial Sequence: Synthetic heavy chain variable region"
gaggtgcagctggtggagtctggggctgaggtgaagaggcctggggcctcagtgaaaatctcctgcaaggcttctgaatacgccttcaccgcccactatcttcactgggtgcgacaggcccctgatcaaggacttgagtggatgggatggatcagccctaaaagtggtggcaccaactatgcacagaagtttcacggcagggtcagcatgaccagtgacacgtccatcagtacagtctatatggaactgagcagcctgacatctgacgacacggccgtctattactgtgcgagaagcagtctggtgggagcaagccccaactttgacttctggggccagggaaccctggtcaccgtctcctca

SEQ ID NO: 386 - protein, 121 aa, Artificial Sequence
  source: /note="Description of Artificial Sequence: Synthetic heavy chain variable region"
EVQLVESGAEVKRPGASVKISCKASEYAFTAHYLHWVRQAPDQGLEWMGWISPKSGGTNYAQKFHGRVSMTSDTSISTVYMELSSLTSDDTAVYYCARSSLVGASPNFDFWGQGTLVTVSS

SEQ ID NO: 387 - protein, 9 aa, Artificial Sequence
  source: /note="Description of Artificial Sequence: Synthetic heavy chain variable region CDR H1"
YAFTAHYLH

SEQ ID NO: 388 - DNA, 27 bp, Artificial Sequence
  source: /note="Description of Artificial Sequence: Synthetic heavy chain variable region CDR H1"
tacgccttcaccgcccactatcttcac

SEQ ID NO: 389 - protein, 17 aa, Artificial Sequence
  source: /note="Description of Artificial Sequence: Synthetic heavy chain variable region CDR H2"
WISPKSGGTNYAQKFHG

SEQ ID NO: 390 - DNA, 51 bp, Artificial Sequence
  source: /note="Description of Artificial Sequence: Synthetic heavy chain variable region CDR H2"
tggatcagccctaaaagtggtggcaccaactatgcacagaagtttcacggc

SEQ ID NO: 391 - protein, 14 aa, Artificial Sequence
  source: /note="Description of Artificial Sequence: Synthetic heavy chain variable region CDR H3"
ARSSLVGASPNFDF

SEQ ID NO: 392 - DNA, 42 bp, Artificial Sequence
  source: /note="Description of Artificial Sequence: Synthetic heavy chain variable region CDR H3"
gcgagaagcagtctggtgggagcaagccccaactttgacttc

SEQ ID NO: 393 - DNA, 333 bp, Artificial Sequence
  source: /note="Description of Artificial Sequence: Synthetic light chain variable region"
cagtctgtgctgacgcagccgccctcagtgtctgcggccccaggacagagggtcaccatctcctgctctggaagcagctccaacattgggaataattatgtatcctggtaccagcaactcccaggaactacccccaaagtcctcatttacgacaataatcagcgaccctcagggattcctgaccgtttctctggctccaagtctggcacgtcagccaccctggccatcagcggactccagactggcgacgaggccgtctattattgcggaacatgggatgccagcctgagtgctgctatggttttcggcggggggaccaagctcaccgtccta

SEQ ID NO: 394 - protein, 111 aa, Artificial Sequence
  source: /note="Description of Artificial Sequence: Synthetic light chain variable region"
QSVLTQPPSVSAAPGQRVTISCSGSSSNIGNNYVSWYQQLPGTTPKVLIYDNNQRPSGIPDRFSGSKSGTSATLAISGLQTGDEAVYYCGTWDASLSAAMVFGGGTKLTVL

SEQ ID NO: 395 - protein, 13 aa, Artificial Sequence
  source: /note="Description of Artificial Sequence: Synthetic light chain variable region CDR L1"
SGSSSNIGNNYVS

SEQ ID NO: 396 - DNA, 39 bp, Artificial Sequence
  source: /note="Description of Artificial Sequence: Synthetic light chain variable region CDR L1"
tctggaagcagctccaacattgggaataattatgtatcc

SEQ ID NO: 397 - protein, 7 aa, Artificial Sequence
  source: /note="Description of Artificial Sequence: Synthetic light chain variable region CDR L2"
DNNQRPS

SEQ ID NO: 398 - DNA, 21 bp, Artificial Sequence
  source: /note="Description of Artificial Sequence: Synthetic light chain variable region CDR L2"
gacaataatcagcgaccctca

SEQ ID NO: 399 - protein, 12 aa, Artificial Sequence
  source: /note="Description of Artificial Sequence: Synthetic light chain variable region CDR L3"
GTWDASLSAAMV

SEQ ID NO: 400 - DNA, 36 bp, Artificial Sequence
  source: /note="Description of Artificial Sequence: Synthetic light chain variable region CDR L3"
ggaacatgggatgccagcctgagtgctgctatggtt

SEQ ID NO: 401 - DNA, 363 bp, Artificial Sequence
  source: /note="Description of Artificial Sequence: Synthetic heavy chain variable region"
caggtgcagctgcaggagtcgggcccaggactggtgaagccttcggagaccctgtccctcacctgcactgtctctggtggctccatcagcggatattactggagctggatccggcagcccccagggaggggactggagtggattgggtttatttattatagtgggagtaccagctacgactcctccctcaagagtcgagtcaccatatcagtagacacgtccaagaaccagttctccctaaacctgagctctgtgaccgctgcggacacggccgtatattactgtgcgagaagtacatgggactacggtgaccactttccgtttgactactggggccagggaaccctggtcaccgtctcctca

SEQ ID NO: 402 - protein, 121 aa, Artificial Sequence
  source: /note="Description of Artificial Sequence: Synthetic heavy chain variable region"
QVQLQESGPGLVKPSETLSLTCTVSGGSISGYYWSWIRQPPGRGLEWIGFIYYSGSTSYDSSLKSRVTISVDTSKNQFSLNLSSVTAADTAVYYCARSTWDYGDHFPFDYWGQGTLVTVSS

SEQ ID NO: 403 - protein, 9 aa, Artificial Sequence
  source: /note="Description of Artificial Sequence: Synthetic heavy chain variable region CDR H1"
GSISGYYWS

SEQ ID NO: 404 - DNA, 27 bp, Artificial Sequence
  source: /note="Description of Artificial Sequence: Synthetic heavy chain variable region CDR H1"
ggctccatcagcggatattactggagc

SEQ ID NO: 405 - protein, 16 aa, Artificial Sequence
  source: /note="Description of Artificial Sequence: Synthetic heavy chain variable region CDR H2"
FIYYSGSTSYDSSLKS

SEQ ID NO: 406 - DNA, 48 bp, Artificial Sequence
  source: /note="Description of Artificial Sequence: Synthetic heavy chain variable region CDR H2"
tttatttattatagtgggagtaccagctacgactcctccctcaagagt

SEQ ID NO: 407 - protein, 15 aa, Artificial Sequence
  source: /note="Description of Artificial Sequence: Synthetic heavy chain variable region CDR H3"
ARSTWDYGDHFPFDY

SEQ ID NO: 408 - DNA, 45 bp, Artificial Sequence
  source: /note="Description of Artificial Sequence: Synthetic heavy chain variable region CDR H3"
gcgagaagtacatgggactacggtgaccactttccgtttgactac

SEQ ID NO: 409 - DNA, 327 bp, Artificial Sequence
  source: /note="Description of Artificial Sequence: Synthetic light chain variable region"
tcctatgagctgactcagccaccctcagtgtcagtggccccaggaaagacggccaggattacctgtgggggaaacaacattggaattaaagatgtgcactggtaccaactgaggccaggccaggcccctgtgttggtcatctcttatgatagcgaccggccctcagggatccctgagcgattctctggctccaactctgggaacacggccaccctgaccatcagcagggtcgaagccggggatgaggccgactatttctgtcaggtgtgggatagtagtcctgatcatccttatgtcttcggaactgggaccaagctcaccgtccta

SEQ ID NO: 410 - protein, 109 aa, Artificial Sequence
  source: /note="Description of Artificial Sequence: Synthetic light chain variable region"
SYELTQPPSVSVAPGKTARITCGGNNIGIKDVHWYQLRPGQAPVLVISYDSDRPSGIPERFSGSNSGNTATLTISRVEAGDEADYFCQVWDSSPDHPYVFGTGTKLTVL

SEQ ID NO: 411 - protein, 11 aa, Artificial Sequence
  source: /note="Description of Artificial Sequence: Synthetic light chain variable region CDR L1"
GGNNIGIKDVH

SEQ ID NO: 412 - DNA, 33 bp, Artificial Sequence
  source: /note="Description of Artificial Sequence: Synthetic light chain variable region CDR L1"
gggggaaacaacattggaattaaagatgtgcac

SEQ ID NO: 413 - protein, 7 aa, Artificial Sequence
  source: /note="Description of Artificial Sequence: Synthetic light chain variable region CDR L2"
YDSDRPS

SEQ ID NO: 414 - DNA, 21 bp, Artificial Sequence
  source: /note="Description of Artificial Sequence: Synthetic light chain variable region CDR L2"
tatgatagcgaccggccctca

SEQ ID NO: 415 - protein, 12 aa, Artificial Sequence
  source: /note="Description of Artificial Sequence: Synthetic light chain variable region CDR L3"
QVWDSSPDHPYV

SEQ ID NO: 416 - DNA, 36 bp, Artificial Sequence
  source: /note="Description of Artificial Sequence: Synthetic light chain variable region CDR L3"
caggtgtgggatagtagtcctgatcatccttatgtc

SEQ ID NO: 417 - DNA, 363 bp, Artificial Sequence
  source: /note="Description of Artificial Sequence: Synthetic heavy chain variable region"
gaggtgcagctggtggagtctggaggtgaggtgaagaagcctggggcctcagtgaaggtctcctgcagggcctctggttacacctttagaaactatggcctcacctgggtgcggcaggcccccggacaagggcttgagtggatgggatggatcagcgcttacaatggaaacacaaactatgcacagaagttccagggcagagtcacactgaccacggacacatccacgagcacagcctacatggaactgaggagcctaagatctgacgacacggccgtgtatttctgtgcgagagacgtccccggccacggcgctgccttcatggacgtctggggcacagggaccacggtcaccgtctcctca

SEQ ID NO: 418 - protein, 121 aa, Artificial Sequence
  source: /note="Description of Artificial Sequence: Synthetic heavy chain variable region"
EVQLVESGGEVKKPGASVKVSCRASGYTFRNYGLTWVRQAPGQGLEWMGWISAYNGNTNYAQKFQGRVTLTTDTSTSTAYMELRSLRSDDTAVYFCARDVPGHGAAFMDVWGTGTTVTVSS

SEQ ID NO: 419 - protein, 9 aa, Artificial Sequence
  source: /note="Description of Artificial Sequence: Synthetic heavy chain variable region CDR H1"
YTFRNYGLT

SEQ ID NO: 420 - DNA, 27 bp, Artificial Sequence
  source: /note="Description of Artificial Sequence: Synthetic heavy chain variable region CDR H1"
tacacctttagaaactatggcctcacc

SEQ ID NO: 421 - protein, 17 aa, Artificial Sequence
  source: /note="Description of Artificial Sequence: Synthetic heavy chain variable region CDR H2"
WISAYNGNTNYAQKFQG

SEQ ID NO: 422 - DNA, 51 bp, Artificial Sequence; identical to SEQ ID NO: 70
  source: /note="Description of Artificial Sequence: Synthetic heavy chain variable region CDR H2"

SEQ ID NO: 423 - protein, 14 aa, Artificial Sequence
  source: /note="Description of Artificial Sequence: Synthetic heavy chain variable region CDR H3"
ARDVPGHGAAFMDV

SEQ ID NO: 424 - DNA, 42 bp, Artificial Sequence; identical to SEQ ID NO: 72
  source: /note="Description of Artificial Sequence: Synthetic heavy chain variable region CDR H3"

SEQ ID NO: 425 - DNA, 336 bp, Artificial Sequence
  source: /note="Description of Artificial Sequence: Synthetic light chain variable region"
gaaacgacactcacgcagtctccactctccctgcccgtcacccttgggcagccggcctccatctcctgcaggtctagtcaaagcctcgaagccagtgatacaaatatctacttgagttggtttcagcagaggccaggccaatctccaaggcgcctaatttataagatttctaaccgagactctggggtcccagacagattcagcggcagtgggtcaggcactcatttcacactgagaatcagcagggtggaggctgacgatgttgcggtttattactgcatgcagggtacacactggcctccggcgttcggccaggggaccaagctggagatcaaa

SEQ ID NO: 426 - protein, 112 aa, Artificial Sequence
  source: /note="Description of Artificial Sequence: Synthetic light chain variable region"
ETTLTQSPLSLPVTLGQPASISCRSSQSLEASDTNIYLSWFQQRPGQSPRRLIYKISNRDSGVPDRFSGSGSGTHFTLRISRVEADDVAVYYCMQGTHWPPAFGQGTKLEIK

SEQ ID NO: 427 - protein, 16 aa, Artificial Sequence
  source: /note="Description of Artificial Sequence: Synthetic light chain variable region CDR L1"
RSSQSLEASDTNIYLS

SEQ ID NO: 428 - DNA, 48 bp, Artificial Sequence; identical to SEQ ID NO: 76
  source: /note="Description of Artificial Sequence: Synthetic light chain variable region CDR L1"

SEQ ID NO: 429 - protein, 7 aa, Artificial Sequence
  source: /note="Description of Artificial Sequence: Synthetic light chain variable region CDR L2"
KISNRDS

SEQ ID NO: 430 - DNA, 21 bp, Artificial Sequence
  source: /note="Description of Artificial Sequence: Synthetic light chain variable region CDR L2"
aagatttctaaccgagactct

SEQ ID NO: 431 - protein, 9 aa, Artificial Sequence
  source: /note="Description of Artificial Sequence: Synthetic light chain variable region CDR L3"
MQGTHWPPA

SEQ ID NO: 432 - DNA, 27 bp, Artificial Sequence
  source: /note="Description of Artificial Sequence: Synthetic light chain variable region CDR L3"
atgcagggtacacactggcctccggcg

SEQ ID NO: 433 - DNA, 363 bp, Artificial Sequence
  source: /note="Description of Artificial Sequence: Synthetic heavy chain variable region"
gaggtgcagctggtggagtctggatctgaggtgaagaagcctggggccgcagtgaaggtatcctgcaaggcttctggttacatctttgccaactttggtgtcagctgggtgcgacaggcccctggacaagggcttgagtggatgggatggatcagcgcttacaatggtaacacaaactatgcacagaagttccagggcagagtcatcatgaccacagacacatccacgagcacagcctacatggagctgaggagcctgagatctgacgacacggccgtgtattattgtgcgagagacccccccgcctacgccgctacattgatggacgtctggggcaaagggaccacggtcaccgtctcctca

SEQ ID NO: 434 - protein, 121 aa, Artificial Sequence
  source: /note="Description of Artificial Sequence: Synthetic heavy chain variable region"
EVQLVESGSEVKKPGAAVKVSCKASGYIFANFGVSWVRQAPGQGLEWMGWISAYNGNTNYAQKFQGRVIMTTDTSTSTAYMELRSLRSDDTAVYYCARDPPAYAATLMDVWGKGTTVTVSS

SEQ ID NO: 435 - protein, 9 aa, Artificial Sequence
  source: /note="Description of Artificial Sequence: Synthetic heavy chain variable region CDR H1"
YIFANFGVS

SEQ ID NO: 436 - DNA, 27 bp, Artificial Sequence
  source: /note="Description of Artificial Sequence: Synthetic heavy chain variable region CDR H1"
tacatctttgccaactttggtgtcagc

SEQ ID NO: 437 - protein, 17 aa, Artificial Sequence
  source: /note="Description of Artificial Sequence: Synthetic heavy chain variable region CDR H2"
WISAYNGNTNYAQKFQG

SEQ ID NO: 438 - DNA, 51 bp, Artificial Sequence; identical to SEQ ID NO: 86
  source: /note="Description of Artificial Sequence: Synthetic heavy chain variable region CDR H2"

SEQ ID NO: 439 - protein, 14 aa, Artificial Sequence
  source: /note="Description of Artificial Sequence: Synthetic heavy chain variable region CDR H3"
ARDPPAYAATLMDV

SEQ ID NO: 440 - DNA, 42 bp, Artificial Sequence; identical to SEQ ID NO: 88
  source: /note="Description of Artificial Sequence: Synthetic heavy chain variable region CDR H3"

SEQ ID NO: 441 - DNA, 336 bp, Artificial Sequence
  source: /note="Description of Artificial Sequence: Synthetic light chain variable region"
gatattgtgatgactcagtctccactctccctgcccgtcacccttggacagtcggcctccatctcctgcaggtctagtcaaagcctcgaacacagtgatacaaacacctacttgacttggtatcagcagaggccaggccaatctccaaggcggctactttataaggtttctaaccgggactctggggtcccagacagattcagcggcagtgggtcaggcactgatttcacactgaaaatcagcagggtggaggctgaggatgttggggtttattactgcatgcaaggtacacactggcctccgacgttcggccaagggaccaagctggagatcaaa

SEQ ID NO: 442 - protein, 112 aa, Artificial Sequence
  source: /note="Description of Artificial Sequence: Synthetic light chain variable region"
DIVMTQSPLSLPVTLGQSASISCRSSQSLEHSDTNTYLTWYQQRPGQSPRRLLYKVSNRDSGVPDRFSGSGSGTDFTLKISRVEAEDVGVYYCMQGTHWPPTFGQGTKLEIK

SEQ ID NO: 443 - protein, 16 aa, Artificial Sequence
  source: /note="Description of Artificial Sequence: Synthetic light chain variable region CDR L1"
RSSQSLEHSDTNTYLT

SEQ ID NO: 444 - DNA, 48 bp, Artificial Sequence; identical to SEQ ID NO: 92
  source: /note="Description of Artificial Sequence: Synthetic light chain variable region CDR L1"

SEQ ID NO: 445 - protein, 7 aa, Artificial Sequence
  source: /note="Description of Artificial Sequence: Synthetic light chain variable region CDR L2"
KVSNRDS

SEQ ID NO: 446 - DNA, 21 bp, Artificial Sequence
  source: /note="Description of Artificial Sequence: Synthetic light chain variable region CDR L2"
aaggtttctaaccgggactct

SEQ ID NO: 447 - protein, 9 aa, Artificial Sequence
  source: /note="Description of Artificial Sequence: Synthetic light chain variable region CDR L3"
MQGTHWPPT

SEQ ID NO: 448 - DNA, 27 bp, Artificial Sequence
  source: /note="Description of Artificial Sequence: Synthetic light chain variable region CDR L3"
atgcaaggtacacactggcctccgacg

SEQ ID NO: 449 - DNA, 399 bp, Artificial Sequence
  source: /note="Description of Artificial Sequence: Synthetic heavy chain variable region"
gaggtgcagctggtggagtctggcccaacactggtgaagccttcggagaccctgtccctcacctgcgttgtctctggtggctccgtctacaggagtagtaactactgggcctggatccgccagcccccagggaaggggctggagtggatcgggagtgtctatcatagtgggaacccctactccaacccgtcccttcagagtcgagtctccgtctccattgacacgtccaagaaccagttctccctgaagctgtactctgtgaccgccgcagactcggctatttattattgtgcgtgtaaaagagcggacgctgacgacgtagattacgtggcgggcctcaccggtttcccctggtacttcgatgtctggggccgtggcaccctggtcaccgtctcctca

SEQ ID NO: 450 - protein, 133 aa, Artificial Sequence
  source: /note="Description of Artificial Sequence: Synthetic heavy chain variable region"
EVQLVESGPTLVKPSETLSLTCVVSGGSVYRSSNYWAWIRQPPGKGLEWIGSVYHSGNPYSNPSLQSRVSVSIDTSKNQFSLKLYSVTAADSAIYYCACKRADADDVDYVAGLTGFPWYFDVWGRGTLVTVSS

SEQ ID NO: 451 - protein, 11 aa, Artificial Sequence
  source: /note="Description of Artificial Sequence: Synthetic heavy chain variable region CDR H1"
GSVYRSSNYWA

SEQ ID NO: 452 - DNA, 33 bp, Artificial Sequence
  source: /note="Description of Artificial Sequence: Synthetic heavy chain variable region CDR H1"
ggctccgtctacaggagtagtaactactgggcc

SEQ ID NO: 453 - protein, 16 aa, Artificial Sequence
  source: /note="Description of Artificial Sequence: Synthetic heavy chain variable region CDR H2"
SVYHSGNPYSNPSLQS

SEQ ID NO: 454 - DNA, 48 bp, Artificial Sequence
  source: /note="Description of Artificial Sequence: Synthetic heavy chain variable region CDR H2"
agtgtctatcatagtgggaacccctactccaacccgtcccttcagagt

SEQ ID NO: 455 - protein, 25 aa, Artificial Sequence
  source: /note="Description of Artificial Sequence: Synthetic heavy chain variable region CDR H3"
ACKRADADDVDYVAGLTGFPWYFDV

SEQ ID NO: 456 - DNA, 75 bp, Artificial Sequence
  source: /note="Description of Artificial Sequence: Synthetic heavy chain variable region CDR H3"
gcgtgtaaaagagcggacgctgacgacgtagattacgtggcgggcctcaccggtttcccctggtacttcgatgtc

SEQ ID NO: 457 - DNA, 324 bp, Artificial Sequence
  source: /note="Description of Artificial Sequence: Synthetic light chain variable region"
gaaattgtgttgacgcagtctccgtccaccctgtctgcatctgtgggagacagagtcaccatcacttgccgggccagtcagagtattagtagttggttggcctggtatcagcagaaaccagggaaaacccctaagttgctcatctataaggcgtctactttagaaagtggggtcccatcaaggttcagcggcagcggatctgggacagaattcactctcaccatcagcagcctgcagcctgatgatttcgcaacctactactgccaacagtatcatgtttatttcccgctcactttcggcggagggaccaaggtggaaatcaaa

SEQ ID NO: 458 - protein, 108 aa, Artificial Sequence
  source: /note="Description of Artificial Sequence: Synthetic light chain variable region"
EIVLTQSPSTLSASVGDRVTITCRASQSISSWLAWYQQKPGKTPKLLIYKASTLESGVPSRFSGSGSGTEFTLTISSLQPDDFATYYCQQYHVYFPLTFGGGTKVEIK

SEQ ID NO: 459 - protein, 11 aa, Artificial Sequence
  source: /note="Description of Artificial Sequence: Synthetic light chain variable region CDR L1"
RASQSISSWLA

SEQ ID NO: 460 - DNA, 33 bp, Artificial Sequence
  source: /note="Description of Artificial Sequence: Synthetic light chain variable region CDR L1"
cgggccagtcagagtattagtagttggttggcc

SEQ ID NO: 461 - protein, 7 aa, Artificial Sequence
  source: /note="Description of Artificial Sequence: Synthetic light chain variable region CDR L2"
KASTLES

SEQ ID NO: 462 - DNA, 21 bp, Artificial Sequence
  source: /note="Description of Artificial Sequence: Synthetic light chain variable region CDR L2"
aaggcgtctactttagaaagt

SEQ ID NO: 463 - protein, 10 aa, Artificial Sequence
  source: /note="Description of Artificial Sequence: Synthetic light chain variable region CDR L3"
QQYHVYFPLT

SEQ ID NO: 464 - DNA, 30 bp, Artificial Sequence
  source: /note="Description of Artificial Sequence: Synthetic light chain variable region CDR L3"
caacagtatcatgtttatttcccgctcact

SEQ ID NO: 465 - DNA, 360 bp, Artificial Sequence
  source: /note="Description of Artificial Sequence: Synthetic heavy chain variable region"
gaggtgcagctggtggagtctgggggaggcgtggtccagcctgggaggtccctgagactctcctgtgtagcgtctggattcagcttcagtatgcatggcatgcactgggtccgccaggctccaggcaaggggctggagtgggtgacagctatatggtatgatggaagtaataaatattatgcagactccgtgaagggccgattcacgatctccagagacaattctaggaacacgctgtatctgcaaatgaacagcctgagagccgaggacacggctgtgtattactgtgcgagagatcatgcctcaactccatactacatggacgtctggggcaaagggaccacggtcaccgtctcttca

SEQ ID NO: 466 - protein, 120 aa, Artificial Sequence
  source: /note="Description of Artificial Sequence: Synthetic heavy chain variable region"
EVQLVESGGGVVQPGRSLRLSCVASGFSFSMHGMHWVRQAPGKGLEWVTAIWYDGSNKYYADSVKGRFTISRDNSRNTLYLQMNSLRAEDTAVYYCARDHASTPYYMDVWGKGTTVTVSS

SEQ ID NO: 467 - protein, 9 aa, Artificial Sequence
  source: /note="Description of Artificial Sequence: Synthetic heavy chain variable region CDR H1"
FSFSMHGMH

SEQ ID NO: 468 - DNA, 27 bp, Artificial Sequence
  source: /note="Description of Artificial Sequence: Synthetic heavy chain variable region CDR H1"
ttcagcttcagtatgcatggcatgcac

SEQ ID NO: 469 - protein, 17 aa, Artificial Sequence
  source: /note="Description of Artificial Sequence: Synthetic heavy chain variable region CDR H2"
AIWYDGSNKYYADSVKG

SEQ ID NO: 470 - DNA, 51 bp, Artificial Sequence; identical to SEQ ID NO: 182
  source: /note="Description of Artificial Sequence: Synthetic heavy chain variable region CDR H2"

SEQ ID NO: 471 - protein, 13 aa, Artificial Sequence
  source: /note="Description of Artificial Sequence: Synthetic heavy chain variable region CDR H3"
ARDHASTPYYMDV

SEQ ID NO: 472 - DNA, 39 bp, Artificial Sequence; identical to SEQ ID NO: 184
  source: /note="Description of Artificial Sequence: Synthetic heavy chain variable region CDR H3"

SEQ ID NO: 473 - DNA, 324 bp, Artificial Sequence
  source: /note="Description of Artificial Sequence: Synthetic light chain variable region"
gaaacgacactcacgcagtctccaggcaccctgtctttgtctccaggggaaagcgccaccctctcctgcaggaccagtcagaggattagcagcacctacttagcctggtaccggcagaaacctggccaggctcccaggctcctcatgtatggtgcatccagcagggccactggcatcccggacaggttcagtggcagtgggtctgggacagacttcactctcaccatcagcagtctggagcctgaagattttgcactatattactgtcagcagtatggtagctttccgtggacgttcggccaagggaccaaggtggaaatcaaa

SEQ ID NO: 474 - protein, 108 aa, Artificial Sequence
  source: /note="Description of Artificial Sequence: Synthetic light chain variable region"
ETTLTQSPGTLSLSPGESATLSCRTSQRISSTYLAWYRQKPGQAPRLLMYGASSRATGIPDRFSGSGSGTDFTLTISSLEPEDFALYYCQQYGSFPWTFGQGTKVEIK

SEQ ID NO: 475 - protein, 12 aa, Artificial Sequence
  source: /note="Description of Artificial Sequence: Synthetic light chain variable region CDR L1"
RTSQRISSTYLA

SEQ ID NO: 476 - DNA, 36 bp, Artificial Sequence; identical to SEQ ID NO: 188
  source: /note="Description of Artificial Sequence: Synthetic light chain variable region CDR L1"

SEQ ID NO: 477 - protein, 7 aa, Artificial Sequence
  source: /note="Description of Artificial Sequence: Synthetic light chain variable region CDR L2"
GASSRAT

SEQ ID NO: 478 - DNA, 21 bp, Artificial Sequence
  source: /note="Description of Artificial Sequence: Synthetic light chain variable region CDR L2"
ggtgcatccagcagggccact

SEQ ID NO: 479 - protein, 9 aa, Artificial Sequence
  source: /note="Description of Artificial Sequence: Synthetic light chain variable region CDR L3"
QQYGSFPWT

SEQ ID NO: 480 - DNA, 27 bp, Artificial Sequence
  source: /note="Description of Artificial Sequence: Synthetic light chain variable region CDR L3"
cagcagtatggtagctttccgtggacg

SEQ ID NO: 481 - DNA, 360 bp, Artificial Sequence
  source: /note="Description of Artificial Sequence: Synthetic heavy chain variable region"
caggtccagctggtgcagtctgggcctgaggtgaagaagcctgggtcctcggtgaaggtctcctgcaaggcttctggaggcaccttcagcagttatgctatcacgtgggtgcgacaggcccctggacaagggcttgagtggatgggggggatcatcccttcctttgatagagtggactattcacggaacttcaaggggagagtcacctttaccgcggacaaatccgcgaacacggcctacatggaactgaccaatgtgagatccgacgacacggccgtgtattactgtgcgagaggctgttgtggggctgtggctggattccagcactggggccagggcaccggggtcaccgtctcctca

SEQ ID NO: 482 - protein, 120 aa, Artificial Sequence
  source: /note="Description of Artificial Sequence: Synthetic heavy chain variable region"
QVQLVQSGPEVKKPGSSVKVSCKASGGTFSSYAITWVRQAPGQGLEWMGGIIPSFDRVDYSRNFKGRVTFTADKSANTAYMELTNVRSDDTAVYYCARGCCGAVAGFQHWGQGTGVTVSS

SEQ ID NO: 483 - protein, 9 aa, Artificial Sequence
  source: /note="Description of Artificial Sequence: Synthetic heavy chain variable region CDR H1"
GTFSSYAIT

SEQ ID NO: 484 - DNA, 27 bp, Artificial Sequence
  source: /note="Description of Artificial Sequence: Synthetic heavy chain variable region CDR H1"
ggcaccttcagcagttatgctatcacg

SEQ ID NO: 485 - protein, 17 aa, Artificial Sequence
  source: /note="Description of Artificial Sequence: Synthetic heavy chain variable region CDR H2"
GIIPSFDRVDYSRNFKG

SEQ ID NO: 486 - DNA, 51 bp, Artificial Sequence
  source: /note="Description of Artificial Sequence: Synthetic heavy chain variable region CDR H2"
gggatcatcccttcctttgatagagtggactattcacggaacttcaagggg

SEQ ID NO: 487 - protein, 13 aa, Artificial Sequence
  source: /note="Description of Artificial Sequence: Synthetic heavy chain variable region CDR H3"
ARGCCGAVAGFQH

SEQ ID NO: 488 - DNA, 39 bp, Artificial Sequence
  source: /note="Description of Artificial Sequence: Synthetic heavy chain variable region CDR H3"
gcgagaggctgttgtggggctgtggctggattccagcac

SEQ ID NO: 489 - DNA, 318 bp, Artificial Sequence
  source: /note="Description of Artificial Sequence: Synthetic light chain variable region"
gatattgtgctgacgcagactccagccaccctgtctttatctccaggggaaacagccaccctctcctgcagggccagtcagagtgttaccacctacttagcctggtaccagcagaaacctggccaggctcccaggctcctcatctatgatgcatccaacagggccactggcgtcccaaccaggttcagtggcagtgggtctgggacagacttcactctcaccatcagcagcctggagcctgaagattatgcgatttattactgtcagcaacgtactaccggggtcactttcggcggggggaccaaggtggaaatcaaa

SEQ ID NO: 490 - protein, 106 aa, Artificial Sequence
  source: /note="Description of Artificial Sequence: Synthetic light chain variable region"
DIVLTQTPATLSLSPGETATLSCRASQSVTTYLAWYQQKPGQAPRLLIYDASNRATGVPTRFSGSGSGTDFTLTISSLEPEDYAIYYCQQRTTGVTFGGGTKVEIK

SEQ ID NO: 491 - protein, 11 aa, Artificial Sequence
  source: /note="Description of Artificial Sequence: Synthetic light chain variable region CDR L1"
RASQSVTTYLA

SEQ ID NO: 492 - DNA, 33 bp, Artificial Sequence
  source: /note="Description of Artificial Sequence: Synthetic light chain variable region CDR L1"
agggccagtcagagtgttaccacctacttagcc

SEQ ID NO: 493 - protein, 7 aa, Artificial Sequence
  source: /note="Description of Artificial Sequence: Synthetic light chain variable region CDR L2"
DASNRAT

SEQ ID NO: 494 - DNA, 21 bp, Artificial Sequence
  source: /note="Description of Artificial Sequence: Synthetic light chain variable region CDR L2"
gatgcatccaacagggccact

SEQ ID NO: 495 - protein, 8 aa, Artificial Sequence
  source: /note="Description of Artificial Sequence: Synthetic light chain variable region CDR L3"
QQRTTGVT

SEQ ID NO: 496 - DNA, 24 bp, Artificial Sequence
  source: /note="Description of Artificial Sequence: Synthetic light chain variable region CDR L3"
cagcaacgtactaccggggtcact

SEQ ID NO: 497 - DNA, 369 bp, Artificial Sequence
  source: /note="Description of Artificial Sequence: Synthetic heavy chain variable region"
caggtgcagctggtggagtctgggggaggcctggtcaagcctggggggtccctgagactctcttgtgcagcctctggattcaccttcagtagttttggcatgcattgggtccgccaggctccagggcagggactggagtgggtcgcatccattactggtggcagcagttacataaactacgcagactcagtgaagggccgattcaccatctccagagacaacgccaagaagtcactgtctctgcaaatgaagaacctgagagccgaggacacggctgagtattactgtgtgcgaggagtcctaccaggtggtactggggggggctggttcgactcctggggccagggaaccctggtcaccgtctcctca

SEQ ID NO: 498 - protein, 123 aa, Artificial Sequence
  source: /note="Description of Artificial Sequence: Synthetic heavy chain variable region"
QVQLVESGGGLVKPGGSLRLSCAASGFTFSSFGMHWVRQAPGQGLEWVASITGGSSYINYADSVKGRFTISRDNAKKSLSLQMKNLRAEDTAEYYCVRGVLPGGTGGGWFDSWGQGTLVTVSS

SEQ ID NO: 499 - protein, 9 aa, Artificial Sequence
  source: /note="Description of Artificial Sequence: Synthetic heavy chain variable region CDR H1"
FTFSSFGMH

SEQ ID NO: 500 - DNA, 27 bp, Artificial Sequence
  source: /note="Description of Artificial Sequence: Synthetic heavy chain variable region CDR H1"
ttcaccttcagtagttttggcatgcat

SEQ ID NO: 501 - protein, 17 aa, Artificial Sequence
  source: /note="Description of Artificial Sequence: Synthetic heavy chain variable region CDR H2"
SITGGSSYINYADSVKG

SEQ ID NO: 502 - DNA, 51 bp, Artificial Sequence
  source: /note="Description of Artificial Sequence: Synthetic heavy chain variable region CDR H2"
tccattactggtggcagcagttacataaactacgcagactcagtgaagggc

SEQ ID NO: 503 - protein, 16 aa, Artificial Sequence
  source: /note="Description of Artificial Sequence: Synthetic heavy chain variable region CDR H3"
VRGVLPGGTGGGWFDS

SEQ ID NO: 504 - DNA, 48 bp, Artificial Sequence
  source: /note="Description of Artificial Sequence: Synthetic heavy chain variable region CDR H3"
gtgcgaggagtcctaccaggtggtactggggggggctggttcgactcc

SEQ ID NO: 505 - DNA, 330 bp, Artificial Sequence
  source: /note="Description of Artificial Sequence: Synthetic light chain variable region"
cagtctgtcctgactcagccgccctcaatgtctggggccccagggcagagggtcaccatctcctgcactgggaccagctccaacatcggggcgggttatgatgtacagtggtatcagcagtttccaggaacagcccccaaactcctcatctctggtaacaacaatcggccctcaggggtccctgaccgattctctggctccaagtctggcgcctcagcctccctggccatcactgggctccaggctgaggatgaggctgattattactgccagtcctatgactacagcctgaattgggtgttcggcggagggaccaagctcaccgtccta

SEQ ID NO: 506 - protein, 110 aa, Artificial Sequence
  source: /note="Description of Artificial Sequence: Synthetic light chain variable region"
QSVLTQPPSMSGAPGQRVTISCTGTSSNIGAGYDVQWYQQFPGTAPKLLISGNNNRPSGVPDRFSGSKSGASASLAITGLQAEDEADYYCQSYDYSLNWVFGGGTKLTVL

SEQ ID NO: 507 - protein, 14 aa, Artificial Sequence
  source: /note="Description of Artificial Sequence: Synthetic light chain variable region CDR L1"
TGTSSNIGAGYDVQ

SEQ ID NO: 508 - DNA, 42 bp, Artificial Sequence
  source: /note="Description of Artificial Sequence: Synthetic light chain variable region CDR L1"
actgggaccagctccaacatcggggcgggttatgatgtacag

SEQ ID NO: 509 - protein, 7 aa, Artificial Sequence
  source: /note="Description of Artificial Sequence: Synthetic light chain variable region CDR L2"
GNNNRPS

SEQ ID NO: 510 - DNA, 21 bp, Artificial Sequence
  source: /note="Description of Artificial Sequence: Synthetic light chain variable region CDR L2"
ggtaacaacaatcggccctca

SEQ ID NO: 511 - protein, 10 aa, Artificial Sequence
  source: /note="Description of Artificial Sequence: Synthetic light chain variable region CDR L3"
QSYDYSLNWV

SEQ ID NO: 512 - DNA, 30 bp, Artificial Sequence
  source: /note="Description of Artificial Sequence: Synthetic light chain variable region CDR L3"
cagtcctatgactacagcctgaattgggtg

SEQ ID NO: 513 - DNA, 381 bp, Artificial Sequence
  source: /note="Description of Artificial Sequence: Synthetic heavy chain variable region"
caggtgcagctgcaggagtcgggcccaggactggtgaagccttcacagaccctgtcgctcacctgcactgtctctggtcgcttcctcaatagtggtgattactactggagttggatccgccagtccccagggaagggcctggagtggcttggttacatccatcacagtgggaacacctactacaacccgtccctcaagagtcgacttaccatatcactagacatgtccaagaaccagttctccctgaagttgagctctgtgacagccgcagacacggccgtctattactgtgccagagatttgggaaagccgctttgggacggccactattactacggagtggacgtctggggccaagggaccacggtcaccgtctcctca

SEQ ID NO: 514 - protein, 127 aa, Artificial Sequence
  source: /note="Description of Artificial Sequence: Synthetic heavy chain variable region"
QVQLQESGPGLVKPSQTLSLTCTVSGRFLNSGDYYWSWIRQSPGKGLEWLGYIHHSGNTYYNPSLKSRLTISLDMSKNQFSLKLSSVTAADTAVYYCARDLGKPLWDGHYYYGVDVWGQGTTVTVSS

SEQ ID NO: 515 - protein, 11 aa, Artificial Sequence
  source: /note="Description of Artificial Sequence: Synthetic heavy chain variable region CDR H1"
RFLNSGDYYWS

SEQ ID NO: 516 - DNA, 33 bp, Artificial Sequence
  source: /note="Description of Artificial Sequence: Synthetic heavy chain variable region CDR H1"
cgcttcctcaatagtggtgattactactggagt

SEQ ID NO: 517 - protein, 16 aa, Artificial Sequence
  source: /note="Description of Artificial Sequence: Synthetic heavy chain variable region CDR H2"
YIHHSGNTYYNPSLKS

SEQ ID NO: 518 - DNA, 48 bp, Artificial Sequence
  source: /note="Description of Artificial Sequence: Synthetic heavy chain variable region CDR H2"
tacatccatcacagtgggaacacctactacaacccgtccctcaagagt

SEQ ID NO: 519 - protein, 19 aa, Artificial Sequence
  source: /note="Description of Artificial Sequence: Synthetic heavy chain variable region CDR H3"
ARDLGKPLWDGHYYYGVDV

SEQ ID NO: 520 - DNA, 57 bp, Artificial Sequence
  source: /note="Description of Artificial Sequence: Synthetic heavy chain variable region CDR H3"
gccagagatttgggaaagccgctttgggacggccactattactacggagtggacgtc

SEQ ID NO: 521 - DNA, 327 bp, Artificial Sequence
  source: /note="Description of Artificial Sequence: Synthetic light chain variable region"
gatattgtgatgactcagtctccaggcactctgtctttgtctccaggagaaagagccaccctctcctgcaggaccagtcagaatgttaacagcaactacttagcctggtaccagcataaacctgggcaggctcccaggctcctcatctatggtgcatccagcagggtcactggcatcccagacaggttcagtggcagtgggtctgggacagacttcactctcaccatcaccagagtggagtctgaagattttgcagtgtattactgtcaggtgtatagtagttcacctccgatcaccttcggccaggggaccaaggtggagatcaaa

SEQ ID NO: 522 - protein, 109 aa, Artificial Sequence
  source: /note="Description of Artificial Sequence: Synthetic light chain variable region"
DIVMTQSPGTLSLSPGERATLSCRTSQNVNSNYLAWYQHKPGQAPRLLIYGASSRVTGIPDRFSGSGSGTDFTLTITRVESEDFAVYYCQVYSSSPPITFGQGTKVEIK

SEQ ID NO: 523 - protein, 12 aa, Artificial Sequence
  source: /note="Description of Artificial Sequence: Synthetic light chain variable region CDR L1"
RTSQNVNSNYLA

SEQ ID NO: 524 - DNA, 36 bp, Artificial Sequence
  source: /note="Description of Artificial Sequence: Synthetic light chain variable region CDR L1"
aggaccagtcagaatgttaacagcaactacttagcc

SEQ ID NO: 525 - protein, 7 aa, Artificial Sequence
  source: /note="Description of Artificial Sequence: Synthetic light chain variable region CDR L2"
GASSRVT

SEQ ID NO: 526 - DNA, 21 bp, Artificial Sequence
  source: /note="Description of Artificial Sequence: Synthetic light chain variable region CDR L2"
ggtgcatccagcagggtcact

SEQ ID NO: 527 - protein, 10 aa, Artificial Sequence
  source: /note="Description of Artificial Sequence: Synthetic light chain variable region CDR L3"
QVYSSSPPIT

SEQ ID NO: 528 - DNA, 30 bp, Artificial Sequence
  source: /note="Description of Artificial Sequence: Synthetic light chain variable region CDR L3"
caggtgtatagtagttcacctccgatcacc

SEQ ID NO: 529 - DNA, 375 bp, Artificial Sequence
  source: /note="Description of Artificial Sequence: Synthetic heavy chain variable region"
caggtccagcttgtgcagtctggggctgaggtgaagaagcctgggtcctcggtgaaggtctcctgcaaggcttctggaggcaccttcagcagttatgctatcagctgggtgcgtcaggccccaggacaagggcttgagtggatgggaggaatcatccctatgtttgatatagtcgactacgcacagaagttccagggcagagtcacgattaccgcggacgaatccacgaacacagcctacatggagctgaccagcctgagatctgaggacacggccgtgtattactgtgcgagaactgcggctttaggaccacctgggactatagtggggtacatggacgtctggggcaaagggaccacggtcaccgtctcctca

SEQ ID NO: 530 - protein, 125 aa, Artificial Sequence
  source: /note="Description of Artificial Sequence: Synthetic heavy chain variable region"
QVQLVQSGAEVKKPGSSVKVSCKASGGTFSSYAISWVRQAPGQGLEWMGGIIPMFDIVDYAQKFQGRVTITADESTNTAYMELTSLRSEDTAVYYCARTAALGPPGTIVGYMDVWGKGTTVTVSS

SEQ ID NO: 531 - protein, 9 aa, Artificial Sequence
  source: /note="Description of Artificial Sequence: Synthetic heavy chain variable region CDR H1"
GTFSSYAIS

SEQ ID NO: 532 - DNA, 27 bp, Artificial Sequence
  source: /note="Description of Artificial Sequence: Synthetic heavy chain variable region CDR H1"
ggcaccttcagcagttatgctatcagc

SEQ ID NO: 533 - protein, 17 aa, Artificial Sequence
  source: /note="Description of Artificial Sequence: Synthetic heavy chain variable region CDR H2"
GIIPMFDIVDYAQKFQG

SEQ ID NO: 534 - DNA, 51 bp, Artificial Sequence
  source: /note="Description of Artificial Sequence: Synthetic heavy chain variable region CDR H2"
ggaatcatccctatgtttgatatagtcgactacgcacagaagttccagggc

SEQ ID NO: 535 - protein, 18 aa, Artificial Sequence
  source: /note="Description of Artificial Sequence: Synthetic heavy chain variable region CDR H3"
ARTAALGPPGTIVGYMDV

SEQ ID NO: 536 - DNA, 54 bp, Artificial Sequence
  source: /note="Description of Artificial Sequence: Synthetic heavy chain variable region CDR H3"
gcgagaactgcggctttaggaccacctgggactatagtggggtacatggacgtc

SEQ ID NO: 537 - DNA, 336 bp, Artificial Sequence
  source: /note="Description of Artificial Sequence: Synthetic light chain variable region"
gatattgtgatgacgcagtctccactctccctgcccgtcacccctggagagccggcctccatctcctgccggtctagtcagagcctcctgcaaagtaatggatacaactatttggattggtacctgcagaagccagggcaggctccacagctcctgatctatttgggttctaatcgggcctccggggtccctgacaagttcagtggcagtggatcaggcacagattttacactgaaaatcagcagagtggaggctgaggatgttggggtttattactgcatgcaaactctacaaactccgtggacgttcggccaagggaccaaggtggaaatcaaa

SEQ ID NO: 538 - protein, 112 aa, Artificial Sequence
  source: /note="Description of Artificial Sequence: Synthetic light chain variable region"
DIVMTQSPLSLPVTPGEPASISCRSSQSLLQSNGYNYLDWYLQKPGQAPQLLIYLGSNRASGVPDKFSGSGSGTDFTLKISRVEAEDVGVYYCMQTLQTPWTFGQGTKVEIK

SEQ ID NO: 539 - protein, 16 aa, Artificial Sequence
  source: /note="Description of Artificial Sequence: Synthetic light chain variable region CDR L1"
RSSQSLLQSNGYNYLD

SEQ ID NO: 540 - DNA, 48 bp, Artificial Sequence
  source: /note="Description of Artificial Sequence: Synthetic light chain variable region CDR L1"
cggtctagtcagagcctcctgcaaagtaatggatacaactatttggat

SEQ ID NO: 541 - protein, 7 aa, Artificial Sequence
  source: /note="Description of Artificial Sequence: Synthetic light chain variable region CDR L2"
LGSNRAS

SEQ ID NO: 542 - DNA, 21 bp, Artificial Sequence
  source: /note="Description of Artificial Sequence: Synthetic light chain variable region CDR L2"
ttgggttctaatcgggcctcc

SEQ ID NO: 543 - protein, 9 aa, Artificial Sequence
  source: /note="Description of Artificial Sequence: Synthetic light chain variable region CDR L3"
MQTLQTPWT

SEQ ID NO: 544 - DNA, 27 bp, Artificial Sequence
  source: /note="Description of Artificial Sequence: Synthetic light chain variable region CDR L3"
atgcaaactctacaaactccgtggacg

SEQ ID NO: 545 - DNA, 357 bp, Artificial Sequence
  source: /note="Description of Artificial Sequence: Synthetic heavy chain variable region"
caggtgcagctggtggagtctggagcagaggcgagaaagcccggggagtctctgaagatctcctgtaaggcttctggatacagctttaccaattattggatcggctgggtgcgccagatgcccgggaaaggcctggagtggatgggggtcatctatcctgctgactccgataccagatatagcccgtccttcaaaggccaggtcaccatctcagccgacaaatccatcagcaccgcctacctccagtggaccagactgaaggcctcggacaccgccgtgtatttctgtgcgagacttggaataggagctgctgcccggaactactggggccagggaaccctggtcaccgtctcttca

SEQ ID NO: 546 - protein, 119 aa, Artificial Sequence
  source: /note="Description of Artificial Sequence: Synthetic heavy chain variable region"
QVQLVESGAEARKPGESLKISCKASGYSFTNYWIGWVRQMPGKGLEWMGVIYPADSDTRYSPSFKGQVTISADKSISTAYLQWTRLKASDTAVYFCARLGIGAAARNYWGQGTLVTVSS

SEQ ID NO: 547 - protein, 9 aa, Artificial Sequence
  source: /note="Description of Artificial Sequence: Synthetic heavy chain variable region CDR H1"
YSFTNYWIG

SEQ ID NO: 548 - DNA, 27 bp, Artificial Sequence
  source: /note="Description of Artificial Sequence: Synthetic heavy chain variable region CDR H1"
tacagctttaccaattattggatcggc

SEQ ID NO: 549 - protein, 17 aa, Artificial Sequence
  source: /note="Description of Artificial Sequence: Synthetic heavy chain variable region CDR H2"
VIYPADSDTRYSPSFKG

SEQ ID NO: 550 - DNA, 51 bp, Artificial Sequence
  source: /note="Description of Artificial Sequence: Synthetic heavy chain variable region CDR H2"
gtcatctatcctgctgactccgataccagatatagcccgtccttcaaaggc

SEQ ID NO: 551 - protein, 12 aa, Artificial Sequence
  source: /note="Description of Artificial Sequence: Synthetic heavy chain variable region CDR H3"
ARLGIGAAARNY

SEQ ID NO: 552 - DNA, 36 bp, Artificial Sequence
  source: /note="Description of Artificial Sequence: Synthetic heavy chain variable region CDR H3"
gcgagacttggaataggagctgctgcccggaactac

SEQ ID NO: 553 - DNA, 321 bp, Artificial Sequence
  source: /note="Description of Artificial Sequence: Synthetic light chain variable region"
gacatccaggtgacccagtctccatcctccctgtctgcatctgtaggagacagagtcaccatcacttgccaggcgagtcaggacattagcgacagtttaaattggtatcagcagaaaccagggaaagcccctaacctcctgatctacgatgcatccaagtcggaaacaggggtcccatcaagattcagtggaagcggatctgggacagatttcactttcaccatcagtagcctgcagcctgaagatcttgcaacatattactgtctacagtttgataatctccctccgaccttcggccaagggacacgactggagattaaa

SEQ ID NO: 554 - protein, 107 aa, Artificial Sequence
  source: /note="Description of Artificial Sequence: Synthetic light chain variable region"
DIQVTQSPSSLSASVGDRVTITCQASQDISDSLNWYQQKPGKAPNLLIYDASKSETGVPSRFSGSGSGTDFTFTISSLQPEDLATYYCLQFDNLPPTFGQGTRLEIK

SEQ ID NO: 555 - protein, 11 aa, Artificial Sequence
  source: /note="Description of Artificial Sequence: Synthetic light chain variable region CDR L1"
QASQDISDSLN

SEQ ID NO: 556 - DNA, 33 bp, Artificial Sequence
  source: /note="Description of Artificial Sequence: Synthetic light chain variable region CDR L1"
caggcgagtcaggacattagcgacagtttaaat

SEQ ID NO: 557 - protein, 7 aa, Artificial Sequence
  source: /note="Description of Artificial Sequence: Synthetic light chain variable region CDR L2"
DASKSET

SEQ ID NO: 558 - DNA, 21 bp, Artificial Sequence
  source: /note="Description of Artificial Sequence: Synthetic light chain variable region CDR L2"
gatgcatccaagtcggaaaca

SEQ ID NO: 559 - protein, 9 aa, Artificial Sequence
  source: /note="Description of Artificial Sequence: Synthetic light chain variable region CDR L3"
LQFDNLPPT

SEQ ID NO: 560 - DNA, 27 bp, Artificial Sequence
  source: /note="Description of Artificial Sequence: Synthetic light chain variable region CDR L3"
ctacagtttgataatctccctccgacc

SEQ ID NO: 561 - DNA, 366 bp, Artificial Sequence
  source: /note="Description of Artificial Sequence: Synthetic heavy chain variable region"
gaggtgcagctggtggagtctgggggaggcctggtcaagcctgggggggccctgagactctcctgtgcagcctctggattcagcttcaggagctatagcatgaactgggtccgccaggctccagggaaggggctggagtgggtctcatccattagtagtagtagtaattacataaactacgcagactcagtgaagggccgattcagcatctccagagacaacgccaagaactcactgtatctgcaaatgaacagcctgagagccgaggacacggctgtctattactgtgcgagagatttgttacccgtcgagcggggtcccgcttttgatatctggggccaagggacaatggtcaccgtctcttca

SEQ ID NO: 562 - protein, 122 aa, Artificial Sequence
  source: /note="Description of Artificial Sequence: Synthetic heavy chain variable region"
EVQLVESGGGLVKPGGALRLSCAASGFSFRSYSMNWVRQAPGKGLEWVSSISSSSNYINYADSVKGRFSISRDNAKNSLYLQMNSLRAEDTAVYYCARDLLPVERGPAFDIWGQGTMVTVSS

SEQ ID NO: 563 - protein, 9 aa, Artificial Sequence
  source: /note="Description of Artificial Sequence: Synthetic heavy chain variable region CDR H1"
FSFRSYSMN

SEQ ID NO: 564 - DNA, 27 bp, Artificial Sequence
  source: /note="Description of Artificial Sequence: Synthetic heavy chain variable region CDR H1"
ttcagcttcaggagctatagcatgaac

SEQ ID NO: 565 - protein, 17 aa, Artificial Sequence
  source: /note="Description of Artificial Sequence: Synthetic heavy chain variable region CDR H2"
SISSSSNYINYADSVKG

SEQ ID NO: 566 - DNA, 51 bp, Artificial Sequence
  source: /note="Description of Artificial Sequence: Synthetic heavy chain variable region CDR H2"
tccattagtagtagtagtaattacataaactacgcagactcagtgaagggc

SEQ ID NO: 567 - protein, 15 aa, Artificial Sequence
  source: /note="Description of Artificial Sequence: Synthetic heavy chain variable region CDR H3"
ARDLLPVERGPAFDI

SEQ ID NO: 568 - DNA, 45 bp, Artificial Sequence
  source: /note="Description of Artificial Sequence: Synthetic heavy chain variable region CDR H3"
gcgagagatttgttacccgtcgagcggggtcccgcttttgatatc

SEQ ID NO: 569 - DNA, 333 bp, Artificial Sequence
  source: /note="Description of Artificial Sequence: Synthetic light chain variable region"
tcctatgagctgacacagccaccctcagtgtctggggccccagggcagagggtcaccatctcctgcactgggagcagctccaacatcggggcaggttatgatgtacactggttccagcagcttccaggagcagcccccaaactcctcatctatgctaacagcaatcggccctcaggggtccctgaccgattctctggctccaagtctggcacctcagcctccctggccatcactgggctccaggctgaggatgaggctgattattactgccagtcctatgacagcagactgggtggttcggtattcggcggagggaccaaggtgaccgtccta

SEQ ID NO: 570 - protein, 111 aa, Artificial Sequence
  source: /note="Description of Artificial Sequence: Synthetic light chain variable region"
SYELTQPPSVSGAPGQRVTISCTGSSSNIGAGYDVHWFQQLPGAAPKLLIYANSNRPSGVPDRFSGSKSGTSASLAITGLQAEDEADYYCQSYDSRLGGSVFGGGTKVTVL

SEQ ID NO: 571 - protein, 14 aa, Artificial Sequence
  source: /note="Description of Artificial Sequence: Synthetic light chain variable region CDR L1"
TGSSSNIGAGYDVH

SEQ ID NO: 572 - DNA, 42 bp, Artificial Sequence
  source: /note="Description of Artificial Sequence: Synthetic light chain variable region CDR L1"
actgggagcagctccaacatcggggcaggttatgatgtacac

SEQ ID NO: 573 - protein, 7 aa, Artificial Sequence
  source: /note="Description of Artificial Sequence: Synthetic light chain variable region CDR L2"
ANSNRPS

SEQ ID NO: 574 - DNA, 21 bp, Artificial Sequence
  source: /note="Description of Artificial Sequence: Synthetic light chain variable region CDR L2"
gctaacagcaatcggccctca

SEQ ID NO: 575 - protein, 11 aa, Artificial Sequence
  source: /note="Description of Artificial Sequence: Synthetic light chain variable region CDR L3"
QSYDSRLGGSV

SEQ ID NO: 576 - DNA, 33 bp, Artificial Sequence
  source: /note="Description of Artificial Sequence: Synthetic light chain variable region CDR L3"
cagtcctatgacagcagactgggtggttcggta

SEQ ID NO: 577 - DNA, 384 bp, Artificial Sequence
  source: /note="Description of Artificial Sequence: Synthetic heavy chain variable region"
caggtccagcttgtgcagtctggaccagaggtgaaaaagcccggggagtctctgacgatctcctgtaagggttctggatacgacttttccaataactggatcggctgggtgcgccagatgcccgggaaaggcctggagtggatgggaatcatctatcctggtgactctgataccagatacagcccgtcgttccaaggccaggtcaccctctcagtcgacaagtccattagtaccgcctacctacagtggaggagcctgaaggcctcggacagcggcatctactactgtgcgagacaaattggcggtttggtttgtagcagtgagagctgctacttctacggcatggacgtctggggccaagggaccacggtcaccgtctcctca

SEQ ID NO: 578 - protein, 128 aa, Artificial Sequence
  source: /note="Description of Artificial Sequence: Synthetic heavy chain variable region"
QVQLVQSGPEVKKPGESLTISCKGSGYDFSNNWIGWVRQMPGKGLEWMGIIYPGDSDTRYSPSFQGQVTLSVDKSISTAYLQWRSLKASDSGIYYCARQIGGLVCSSESCYFYGMDVWGQGTTVTVSS

SEQ ID NO: 579 - protein, 9 aa, Artificial Sequence
  source: /note="Description of Artificial Sequence: Synthetic heavy chain variable region CDR H1"
YDFSNNWIG

SEQ ID NO: 580 - DNA, 27 bp, Artificial Sequence
  source: /note="Description of Artificial Sequence: Synthetic heavy chain variable region CDR H1"
tacgacttttccaataactggatcggc

SEQ ID NO: 581 - protein, 17 aa, Artificial Sequence
  source: /note="Description of Artificial Sequence: Synthetic heavy chain variable region CDR H2"
IIYPGDSDTRYSPSFQG

SEQ ID NO: 582 - DNA, 51 bp, Artificial Sequence
  source: /note="Description of Artificial Sequence: Synthetic heavy chain variable region CDR H2"
atcatctatcctggtgactctgataccagatacagcccgtcgttccaaggc

SEQ ID NO: 583 - protein, 21 aa, Artificial Sequence
  source: /note="Description of Artificial Sequence: Synthetic heavy chain variable region CDR H3"
ARQIGGLVCSSESCYFYGMDV

SEQ ID NO: 584 - DNA, 63 bp, Artificial Sequence
  source: /note="Description of Artificial Sequence: Synthetic heavy chain variable region CDR H3"
gcgagacaaattggcggtttggtttgtagcagtgagagctgctacttctacggcatggacgtc

SEQ ID NO: 585 - DNA, 321 bp, Artificial Sequence
  source: /note="Description of Artificial Sequence: Synthetic light chain variable region"
gacatccagttgacccagtctccatcctccctgtctgcatctgtgggaggcagagtgaccatcacttgccgggcaagtcagagcattagcaactatttaaattggtatcaacacaaaccggggaaagcccctgaactcctgatctatggtgcatccagtttgcaaagtggggtcccatcaaggttcagtggcagtggatctgggacagacttcactctcaccatcagcagtctgcaacctgaagattttgcaacttactactgtcaacagagtgacactaccccgttcactttcggccaggggaccaaagtggatatcaaa

SEQ ID NO: 586 - protein, 107 aa, Artificial Sequence
  source: /note="Description of Artificial Sequence: Synthetic light chain variable region"
DIQLTQSPSSLSASVGGRVTITCRASQSISNYLNWYQHKPGKAPELLIYGASSLQSGVPSRFSGSGSGTDFTLTISSLQPEDFATYYCQQSDTTPFTFGQGTKVDIK

SEQ ID NO: 587 - protein, 11 aa, Artificial Sequence
  source: /note="Description of Artificial Sequence: Synthetic light chain variable region CDR L1"
RASQSISNYLN

SEQ ID NO: 588 - DNA, 33 bp, Artificial Sequence
  source: /note="Description of Artificial Sequence: Synthetic light chain variable region CDR L1"
cgggcaagtcagagcattagcaactatttaaat

SEQ ID NO: 589 - protein, 7 aa, Artificial Sequence
  source: /note="Description of Artificial Sequence: Synthetic light chain variable region CDR L2"
GASSLQS

SEQ ID NO: 590 - DNA, 21 bp, Artificial Sequence
  source: /note="Description of Artificial Sequence: Synthetic light chain variable region CDR L2"
ggtgcatccagtttgcaaagt

SEQ ID NO: 591 - protein, 9 aa, Artificial Sequence
  source: /note="Description of Artificial Sequence: Synthetic light chain variable region CDR L3"
QQSDTTPFT

SEQ ID NO: 592 - DNA, 27 bp, Artificial Sequence
  source: /note="Description of Artificial Sequence: Synthetic light chain variable region CDR L3"
caacagagtgacactaccccgttcact

SEQ ID NO: 593 - DNA, 387 bp, Artificial Sequence
  source: /note="Description of Artificial Sequence: Synthetic heavy chain variable region"
caggtccagctggtgcagtctgggggaggcttggtaaagccgggggggtcccttagactctcctgtgcagcctctggattcactttcagtaaggcctggatgaactgggtccgccaggctccagggaaggggctggagtgggttggccgtattagaagcaaaactgatggtgggacagcagactacgcggcacccgtgaaaggcagattcaccatgtcaagagatgattcaaaaaacacgctgtatttgcaaatgaacagcctgaaaaccgaggacacagccgtgtattactgtgccacagattctcgccgactctatgatagtcgtggtttttattcaagtgcttttgatgtctggggccaagggaccacggtcaccgtctcctca

SEQ ID NO: 594 - protein, 129 aa, Artificial Sequence
  source: /note="Description of Artificial Sequence: Synthetic heavy chain variable region"
QVQLVQSGGGLVKPGGSLRLSCAASGFTFSKAWMNWVRQAPGKGLEWVGRIRSKTDGGTADYAAPVKGRFTMSRDDSKNTLYLQMNSLKTEDTAVYYCATDSRRLYDSRGFYSSAFDVWGQGTTVTVSS

SEQ ID NO: 595 - protein, 9 aa, Artificial Sequence
  source: /note="Description of Artificial Sequence: Synthetic heavy chain variable region CDR H1"
FTFSKAWMN

SEQ ID NO: 596 - DNA, 27 bp, Artificial Sequence
  source: /note="Description of Artificial Sequence: Synthetic heavy chain variable region CDR H1"
ttcactttcagtaaggcctggatgaac

SEQ ID NO: 597 - protein, 19 aa, Artificial Sequence
  source: /note="Description of Artificial Sequence: Synthetic heavy chain variable region CDR H2"
RIRSKTDGGTADYAAPVKG

SEQ ID NO: 598 - DNA, 57 bp, Artificial Sequence
  source: /note="Description of Artificial Sequence: Synthetic heavy chain variable region CDR H2"
cgtattagaagcaaaactgatggtgggacagcagactacgcggcacccgtgaaaggc

SEQ ID NO: 599 - protein, 20 aa, Artificial Sequence
  source: /note="Description of Artificial Sequence: Synthetic heavy chain variable region CDR H3"
ATDSRRLYDSRGFYSSAFDV

SEQ ID NO: 600 - DNA, 60 bp, Artificial Sequence
  source: /note="Description of Artificial Sequence: Synthetic heavy chain variable region CDR H3"
gccacagattctcgccgactctatgatagtcgtggtttttattcaagtgcttttgatgtc

SEQ ID NO: 601 - DNA, 333 bp, Artificial Sequence
  source: /note="Description of Artificial Sequence: Synthetic light chain variable region"
cagtctgtcctgacgcagccgccctcagtgtctggggccccagggcagagggtcaccatctcctgcactgggagcagctccaacatcggggcgggttatgatgtacactggtaccaacaccttccaggaacagcccccaaagtcctcatctatggtaacaacaatcggccctcaggggtccctgaccgattctctggctccaagtctggcacctcagcctccctggccatcactgggctccaggctgaggatgaggctgattattactgccagtcctatgacgacagcctgactggttgggtgttcggcggagggaccaaggtcaccgtccta

SEQ ID NO: 602 - protein, 111 aa, Artificial Sequence
  source: /note="Description of Artificial Sequence: Synthetic light chain variable region"
QSVLTQPPSVSGAPGQRVTISCTGSSSNIGAGYDVHWYQHLPGTAPKVLIYGNNNRPSGVPDRFSGSKSGTSASLAITGLQAEDEADYYCQSYDDSLTGWVFGGGTKVTVL

SEQ ID NO: 603 - protein, 14 aa, Artificial Sequence
  source: /note="Description of Artificial Sequence: Synthetic light chain variable region CDR L1"
TGSSSNIGAGYDVH

SEQ ID NO: 604 - DNA, 42 bp, Artificial Sequence
  source: /note="Description of Artificial Sequence: Synthetic light chain variable region CDR L1"
actgggagcagctccaacatcggggcgggttatgatgtacac

SEQ ID NO: 605 - protein, 7 aa, Artificial Sequence
  source: /note="Description of Artificial Sequence: Synthetic light chain variable region CDR L2"
GNNNRPS

SEQ ID NO: 606 - DNA, 21 bp, Artificial Sequence
  source: /note="Description of Artificial Sequence: Synthetic light chain variable region CDR L2"
ggtaacaacaatcggccctca

SEQ ID NO: 607 - protein, 11 aa, Artificial Sequence
  source: /note="Description of Artificial Sequence: Synthetic light chain variable region CDR L3"
QSYDDSLTGWV

SEQ ID NO: 608 - DNA, 33 bp, Artificial Sequence
  source: /note="Description of Artificial Sequence: Synthetic light chain variable region CDR L3"
cagtcctatgacgacagcctgactggttgggtg

SEQ ID NO: 609 - DNA, 384 bp, Artificial Sequence
  source: /note="Description of Artificial Sequence: Synthetic heavy chain variable region"
caggtgcagctggtgcaatctggaccagaggtgaaaaagcccggggagtctctgacgatctcctgtaagggttctggatacgacttttccaataactggatcggctgggtgcgccagatgcccgggaaaggcctggagtggatgggaatcatctatcctggtgactctgataccagatacagcccgtcgttccaaggccaggtcaccctctcagtcgacaagtccattagtaccgcctacctacagtggaggagcctgaaggcctcggacagcggcatctactactgtgcgagacaaattggcggtttggtttgtagcagtgagagctgctacttctacggcatggacgtctggggccaagggaccacggtcaccgtctcctca

SEQ ID NO: 610 - protein, 128 aa, Artificial Sequence; identical to SEQ ID NO: 578
  source: /note="Description of Artificial Sequence: Synthetic heavy chain variable region"

SEQ ID NO: 611 - protein, 9 aa, Artificial Sequence
  source: /note="Description of Artificial Sequence: Synthetic heavy chain variable region CDR H1"
YDFSNNWIG

SEQ ID NO: 612 - DNA, 27 bp, Artificial Sequence
  source: /note="Description of Artificial Sequence: Synthetic heavy chain variable region CDR H1"
tacgacttttccaataactggatcggc

SEQ ID NO: 613 - protein, 17 aa, Artificial Sequence
  source: /note="Description of Artificial Sequence: Synthetic heavy chain variable region CDR H2"
IIYPGDSDTRYSPSFQG

SEQ ID NO: 614 - DNA, 51 bp, Artificial Sequence; identical to SEQ ID NO: 582
  source: /note="Description of Artificial Sequence: Synthetic heavy chain variable region CDR H2"

SEQ ID NO: 615 - protein, 21 aa, Artificial Sequence
  source: /note="Description of Artificial Sequence: Synthetic heavy chain variable region CDR H3"
ARQIGGLVCSSESCYFYGMDV

SEQ ID NO: 616 - DNA, 63 bp, Artificial Sequence; identical to SEQ ID NO: 584
  source: /note="Description of Artificial Sequence: Synthetic heavy chain variable region CDR H3"

SEQ ID NO: 617 - DNA, 321 bp, Artificial Sequence
  source: /note="Description of Artificial Sequence: Synthetic light chain variable region"
gacatccgggtgacccagtctccatcctccctgtctgcatctgtgggaggcagagtgaccatcacttgccgggcaagtcagagcattagcaactatttaaattggtatcaacacaaaccggggaaagcccctgaactcctgatctatggtgcatccagtttgcaaagtggggtcccatcaaggttcagtggcagtggatctgggacagacttcactctcaccatcagcagtctgcaacctgaagattttgcaacttactactgtcaacagagtgacactaccccgttcactttcggccaggggaccaagctggagatcaaa

SEQ ID NO: 618 - protein, 107 aa, Artificial Sequence
  source: /note="Description of Artificial Sequence: Synthetic light chain variable region"
DIRVTQSPSSLSASVGGRVTITCRASQSISNYLNWYQHKPGKAPELLIYGASSLQSGVPSRFSGSGSGTDFTLTISSLQPEDFATYYCQQSDTTPFTFGQGTKLEIK

SEQ ID NO: 619 - protein, 11 aa, Artificial Sequence
  source: /note="Description of Artificial Sequence: Synthetic light chain variable region CDR L1"
RASQSISNYLN

SEQ ID NO: 620 - DNA, 33 bp, Artificial Sequence; identical to SEQ ID NO: 588
  source: /note="Description of Artificial Sequence: Synthetic light chain variable region CDR L1"

SEQ ID NO: 621 - protein, 7 aa, Artificial Sequence
  source: /note="Description of Artificial Sequence: Synthetic light chain variable region CDR L2"
GASSLQS

SEQ ID NO: 622 - DNA, 21 bp, Artificial Sequence
  source: /note="Description of Artificial Sequence: Synthetic light chain variable region CDR L2"
ggtgcatccagtttgcaaagt

SEQ ID NO: 623 - protein, 9 aa, Artificial Sequence
  source: /note="Description of Artificial Sequence: Synthetic light chain variable region CDR L3"
QQSDTTPFT

SEQ ID NO: 624 - DNA, 27 bp, Artificial Sequence
  source: /note="Description of Artificial Sequence: Synthetic light chain variable region CDR L3"
caacagagtgacactaccccgttcact

SEQ ID NO: 625 - DNA, 369 bp, Artificial Sequence
  source: /note="Description of Artificial Sequence: Synthetic heavy chain variable region"
gaggtgcagctggtggagtctgggggaggcctggtcaagcctggggggtccctgagactctcttgtgcagcctctggattcaccttcagtagttttggcatgcattgggtccgccaggctccagggcagggactggagtgggtcgcatccattactggtggcagcagttacataaactacgcagactcagtgaagggccgattcaccatctccagagacaacgccaagaagtcactgtctctgcaaatgaagaacctgagagccgaggacacggctgagtattactgtgtgcgaggagtcctaccaggtgatactggggggggctggttcgactcctggggccagggaaccctggtcaccgtctcctca

SEQ ID NO: 626 - protein, 123 aa, Artificial Sequence
  source: /note="Description of Artificial Sequence: Synthetic heavy chain variable region"
EVQLVESGGGLVKPGGSLRLSCAASGFTFSSFGMHWVRQAPGQGLEWVASITGGSSYINYADSVKGRFTISRDNAKKSLSLQMKNLRAEDTAEYYCVRGVLPGDTGGGWFDSWGQGTLVTVSS

SEQ ID NO: 627 - protein, 9 aa, Artificial Sequence
  source: /note="Description of Artificial Sequence: Synthetic heavy chain variable region CDR H1"
FTFSSFGMH

SEQ ID NO: 628 - DNA, 27 bp, Artificial Sequence
  source: /note="Description of Artificial Sequence: Synthetic heavy chain variable region CDR H1"
ttcaccttcagtagttttggcatgcat

SEQ ID NO: 629 - protein, 17 aa, Artificial Sequence
  source: /note="Description of Artificial Sequence: Synthetic heavy chain variable region CDR H2"
SITGGSSYINYADSVKG

SEQ ID NO: 630 - DNA, 51 bp, Artificial Sequence; identical to SEQ ID NO: 502
  source: /note="Description of Artificial Sequence: Synthetic heavy chain variable region CDR H2"

SEQ ID NO: 631 - protein, 16 aa, Artificial Sequence
  source: /note="Description of Artificial Sequence: Synthetic heavy chain variable region CDR H3"
VRGVLPGDTGGGWFDS

SEQ ID NO: 632 - DNA, 48 bp, Artificial Sequence
  source: /note="Description of Artificial Sequence: Synthetic heavy chain variable region CDR H3"
gtgcgaggagtcctaccaggtgatactggggggggctggttcgactcc

SEQ ID NO: 633 - DNA, 330 bp, Artificial Sequence
  source: /note="Description of Artificial Sequence: Synthetic light chain variable region"
cagtctgtgctgacgcagccgccctcaatgtctggggccccagggcagagggtcaccatctcctgcactgggaccagctccaacatcggggcgggttatgatgtacagtggtatcagcagtttccaggaacagcccccaaactcctcatctctggtaacaacaatcggccctcaggggtccctgaccgattctctggctccaagtctggcgcctcagcctccctggccatcactgggctccaggctgaggatgaggctgattattactgccagtcctatgactacagcctgaattgggtgttcggcggagggaccaagctgaccgtccta

SEQ ID NO: 634 - protein, 110 aa, Artificial Sequence; identical to SEQ ID NO: 506
  source: /note="Description of Artificial Sequence: Synthetic light chain variable region"

SEQ ID NO: 635 - protein, 14 aa, Artificial Sequence
  source: /note="Description of Artificial Sequence: Synthetic light chain variable region CDR L1"
TGTSSNIGAGYDVQ

SEQ ID NO: 636 - DNA, 42 bp, Artificial Sequence; identical to SEQ ID NO: 508
  source: /note="Description of Artificial Sequence: Synthetic light chain variable region CDR L1"

SEQ ID NO: 637 - protein, 7 aa, Artificial Sequence
  source: /note="Description of Artificial Sequence: Synthetic light chain variable region CDR L2"
GNNNRPS

SEQ ID NO: 638 - DNA, 21 bp, Artificial Sequence
  source: /note="Description of Artificial Sequence: Synthetic light chain variable region CDR L2"
ggtaacaacaatcggccctca

SEQ ID NO: 639 - protein, 10 aa, Artificial Sequence
  source: /note="Description of Artificial Sequence: Synthetic light chain variable region CDR L3"
QSYDYSLNWV

SEQ ID NO: 640 - DNA, 30 bp, Artificial Sequence; identical to SEQ ID NO: 512
  source: /note="Description of Artificial Sequence: Synthetic light chain variable region CDR L3"

SEQ ID NO: 641 - DNA, 360 bp, Artificial Sequence
  source: /note="Description of Artificial Sequence: Synthetic heavy chain variable region"
caggtccagcttgtacagtctggagcagaggtgaaaaagcccggggagtctctgaagatctcctgtaagggttctggatacagctttagcagtttctggatcggctgggtgcgccagatgcccgggaaaggcctggagtggatgggcatcatatatcctggtgactctgataccagatatagcccgtctttccaaggccaggtcaccatgtcagccgacacgtccataaacaccgcctacctgcagtggaacagcgtgaaggcctcggacaccgccatttattactgtgcgagacttccagttggtagttattattacttcaatctctggggccgtggcaccctggtcaccgtctcctca

SEQ ID NO: 642 - protein, 120 aa, Artificial Sequence
  source: /note="Description of Artificial Sequence: Synthetic heavy chain variable region"
QVQLVQSGAEVKKPGESLKISCKGSGYSFSSFWIGWVRQMPGKGLEWMGIIYPGDSDTRYSPSFQGQVTMSADTSINTAYLQWNSVKASDTAIYYCARLPVGSYYYFNLWGRGTLVTVSS

SEQ ID NO: 643 - protein, 9 aa, Artificial Sequence
  source: /note="Description of Artificial Sequence: Synthetic heavy chain variable region CDR H1"
YSFSSFWIG

SEQ ID NO: 644 - DNA, 27 bp, Artificial Sequence
  source: /note="Description of Artificial Sequence: Synthetic heavy chain variable region CDR H1"
tacagctttagcagtttctggatcggc

SEQ ID NO: 645 - protein, 17 aa, Artificial Sequence
  source: /note="Description of Artificial Sequence: Synthetic heavy chain variable region CDR H2"
IIYPGDSDTRYSPSFQG

SEQ ID NO: 646 - DNA, 51 bp, Artificial Sequence
  source: /note="Description of Artificial Sequence: Synthetic heavy chain variable region CDR H2"
atcatatatcctggtgactctgataccagatatagcccgtctttccaaggc

SEQ ID NO: 647 - protein, 13 aa, Artificial Sequence
  source: /note="Description of Artificial Sequence: Synthetic heavy chain variable region CDR H3"
ARLPVGSYYYFNL

SEQ ID NO: 648 - DNA, 39 bp, Artificial Sequence
  source: /note="Description of Artificial Sequence: Synthetic heavy chain variable region CDR H3"
gcgagacttccagttggtagttattattacttcaatctc

SEQ ID NO: 649 - DNA, 324 bp, Artificial Sequence
  source: /note="Description of Artificial Sequence: Synthetic light chain variable region"
gaaattgtgatgacacagtctccagccaccctgtctgtgtctccaggggaaagcgccaccctattttgcagggccagtcagagtattagtagcgacttagcctggtaccagcagagacctggccaggctcccaggctcctcatctatgatgcatccaccagggccactggtgtccctgccaggttcagtgccactgggtctgaggcagagttcactctcaccatcagcggcctgcagtctgaagattttgcagtttattactgtcagcagtataataactggctttcgtggacgttcggccaagggaccaagctggagatcaaa

SEQ ID NO: 650 - protein, 108 aa, Artificial Sequence
  source: /note="Description of Artificial Sequence: Synthetic light chain variable region"
EIVMTQSPATLSVSPGESATLFCRASQSISSDLAWYQQRPGQAPRLLIYDASTRATGVPARFSATGSEAEFTLTISGLQSEDFAVYYCQQYNNWLSWTFGQGTKLEIK

SEQ ID NO: 651 - protein, 11 aa, Artificial Sequence
  source: /note="Description of Artificial Sequence: Synthetic light chain variable region CDR L1"
RASQSISSDLA

SEQ ID NO: 652 - DNA, 33 bp, Artificial Sequence
  source: /note="Description of Artificial Sequence: Synthetic light chain variable region CDR L1"
agggccagtcagagtattagtagcgacttagcc

SEQ ID NO: 653 - protein, 7 aa, Artificial Sequence
  source: /note="Description of Artificial Sequence: Synthetic light chain variable region CDR L2"
DASTRAT

SEQ ID NO: 654 - DNA, 21 bp, Artificial Sequence
  source: /note="Description of Artificial Sequence: Synthetic light chain variable region CDR L2"
gatgcatccaccagggccact

SEQ ID NO: 655 - protein, 10 aa, Artificial Sequence
  source: /note="Description of Artificial Sequence: Synthetic light chain variable region CDR L3"
QQYNNWLSWT

SEQ ID NO: 656 - DNA, 30 bp, Artificial Sequence
  source: /note="Description of Artificial Sequence: Synthetic light chain variable region CDR L3"
cagcagtataataactggctttcgtggacg

SEQ ID NO: 657 - DNA, 360 bp, Artificial Sequence
  source: /note="Description of Artificial Sequence: Synthetic heavy chain variable region"
caggtgcagctgcaggagtcgggcccaggactggagaagccttcacagaccctgtccctcacctgcactgtctctcgtggctccatcagaattggtggttacttctggagttggatccgccagcacccagggaagggtctggagtggcttggatacatctctaacgatggggccaccgactacaacccgtccctcaggagtcgacttgccatatcagcagacacatctaagaaccagttttccctgaccctgaggtctgtgactgccgcggacacggccatctattactgtgcgagaacttcttatgcagggcgcatgctcgaccgctggggccagggaatcctggtcaccgtctcctca

SEQ ID NO: 658 - protein, 120 aa, Artificial Sequence
  source: /note="Description of Artificial Sequence: Synthetic heavy chain variable region"
QVQLQESGPGLEKPSQTLSLTCTVSRGSIRIGGYFWSWIRQHPGKGLEWLGYISNDGATDYNPSLRSRLAISADTSKNQFSLTLRSVTAADTAIYYCARTSYAGRMLDRWGQGILVTVSS

SEQ ID NO: 659 - protein, 11 aa, Artificial Sequence
  source: /note="Description of Artificial Sequence: Synthetic heavy chain variable region CDR H1"
GSIRIGGYFWS

SEQ ID NO: 660 - DNA, 33 bp, Artificial Sequence
  source: /note="Description of Artificial Sequence: Synthetic heavy chain variable region CDR H1"
ggctccatcagaattggtggttacttctggagt

SEQ ID NO: 661 - protein, 16 aa, Artificial Sequence
  source: /note="Description of Artificial Sequence: Synthetic heavy chain variable region CDR H2"
YISNDGATDYNPSLRS

SEQ ID NO: 662 - DNA, 48 bp, Artificial Sequence
  source: /note="Description of Artificial Sequence: Synthetic heavy chain variable region CDR H2"
tacatctctaacgatggggccaccgactacaacccgtccctcaggagt

SEQ ID NO: 663 - protein, 12 aa, Artificial Sequence
  source: /note="Description of Artificial Sequence: Synthetic heavy chain variable region CDR H3"
ARTSYAGRMLDR

SEQ ID NO: 664 - DNA, 36 bp, Artificial Sequence
  source: /note="Description of Artificial Sequence: Synthetic heavy chain variable region CDR H3"
gcgagaacttcttatgcagggcgcatgctcgaccgc

SEQ ID NO: 665 - DNA, 336 bp, Artificial Sequence
  source: /note="Description of Artificial Sequence: Synthetic light chain variable region"
gacatccgggtgacccagtctccagtctccctgcccgtcacccctggagagccggcctccatctcctgcaggtctagtcagagtctcctgcatagtaatggaaacaactatttggattggtacctgcagaagccagggcagtctccacaactcctgatctatatgggttcttatcgggcctccggggtccctgacaggttcagcggcagtggatcaggcacagattttacactgaaaatcagcagagtggaggctgaggatgttggtgtttattactgcatgcaaggtctacaaattccttggacgttcggccaagggaccaagctggagatcaaa

SEQ ID NO: 666 - protein, 112 aa, Artificial Sequence
  source: /note="Description of Artificial Sequence: Synthetic light chain variable region"
DIRVTQSPVSLPVTPGEPASISCRSSQSLLHSNGNNYLDWYLQKPGQSPQLLIYMGSYRASGVPDRFSGSGSGTDFTLKISRVEAEDVGVYYCMQGLQIPWTFGQGTKLEIK

SEQ ID NO: 667 - protein, 16 aa, Artificial Sequence
  source: /note="Description of Artificial Sequence: Synthetic light chain variable region CDR L1"
RSSQSLLHSNGNNYLD

SEQ ID NO: 668 - DNA, 48 bp, Artificial Sequence
  source: /note="Description of Artificial Sequence: Synthetic light chain variable region CDR L1"
aggtctagtcagagtctcctgcatagtaatggaaacaactatttggat

SEQ ID NO: 669 - protein, 7 aa, Artificial Sequence
  source: /note="Description of Artificial Sequence: Synthetic light chain variable region CDR L2"
MGSYRAS

SEQ ID NO: 670 - DNA, 21 bp, Artificial Sequence
  source: /note="Description of Artificial Sequence: Synthetic light chain variable region CDR L2"
atgggttcttatcgggcctcc

SEQ ID NO: 671 - protein, 9 aa, Artificial Sequence
  source: /note="Description of Artificial Sequence: Synthetic light chain variable region CDR L3"
MQGLQIPWT

SEQ ID NO: 672 - DNA, 27 bp, Artificial Sequence
  source: /note="Description of Artificial Sequence: Synthetic light chain variable region CDR L3"
atgcaaggtctacaaattccttggacg

SEQ ID NO: 673 - DNA, 378 bp, Artificial Sequence
  source: /note="Description of Artificial Sequence: Synthetic heavy chain variable region"
gaggtgcagctgttggagtctgggggaggcgtggtccagcctgggaggtccctcagactctcctgtgcagcctctggattcaccttcagtagctatgccatgcactgggtccgccagactccagacaaggggctggagtgggtggcacttatatccgatgatggaagaaatgaatattatgcagattccgtgcagggccgattcaccatctccagagacaaatccaagaacacgctgcatctggaaatgaacagcctgagagctgaggacacggctgtttattactgtgcgaaagtacgaaatgaggcgtgggagctcctgggtaatgatgatgctcttgatgtctggggccaagggacaatggtcaccgtctcttca

SEQ ID NO: 674 - protein, 126 aa, Artificial Sequence
  source: /note="Description of Artificial Sequence: Synthetic heavy chain variable region"
EVQLLESGGGVVQPGRSLRLSCAASGFTFSSYAMHWVRQTPDKGLEWVALISDDGRNEYYADSVQGRFTISRDKSKNTLHLEMNSLRAEDTAVYYCAKVRNEAWELLGNDDALDVWGQGTMVTVSS

SEQ ID NO: 675 - protein, 9 aa, Artificial Sequence
  source: /note="Description of Artificial Sequence: Synthetic heavy chain variable region CDR H1"
FTFSSYAMH

SEQ ID NO: 676 - DNA, 27 bp, Artificial Sequence
  source: /note="Description of Artificial Sequence: Synthetic heavy chain variable region CDR H1"
ttcaccttcagtagctatgccatgcac

SEQ ID NO: 677 - protein, 17 aa, Artificial Sequence
  source: /note="Description of Artificial Sequence: Synthetic heavy chain variable region CDR H2"
LISDDGRNEYYADSVQG

SEQ ID NO: 678 - DNA, 51 bp, Artificial Sequence
  source: /note="Description of Artificial Sequence: Synthetic heavy chain variable region CDR H2"
cttatatccgatgatggaagaaatgaatattatgcagattccgtgcagggc

SEQ ID NO: 679 - protein, 19 aa, Artificial Sequence
  source: /note="Description of Artificial Sequence: Synthetic heavy chain variable region CDR H3"
AKVRNEAWELLGNDDALDV

SEQ ID NO: 680 - DNA, 57 bp, Artificial Sequence
  source: /note="Description of Artificial Sequence: Synthetic heavy chain variable region CDR H3"
gcgaaagtacgaaatgaggcgtgggagctcctgggtaatgatgatgctcttgatgtc

SEQ ID NO: 681 - DNA, 330 bp, Artificial Sequence
  source: /note="Description of Artificial Sequence: Synthetic light chain variable region"
cagtctgtgctgacgcagccgccctcagtgtctgcggccccaggacagaaagtcaccatctcctgctctggaactagcttcaacattggcagtaattacgtatcctggtaccagctactcccaggaacagcccccaaactcctcatttttgacaattataagcgaccctcagggattcctgaccgattctctggctcctggtctggcacgtcagccaccctggccatcagcggactccagactggggacgaggccgaatacttctgcggaacttgggacaccagcctgagagctggagtgttcggcggagggaccaagctcaccgtccta

SEQ ID NO: 682 - protein, 110 aa, Artificial Sequence
  source: /note="Description of Artificial Sequence: Synthetic light chain variable region"
QSVLTQPPSVSAAPGQKVTISCSGTSFNIGSNYVSWYQLLPGTAPKLLIFDNYKRPSGIPDRFSGSWSGTSATLAISGLQTGDEAEYFCGTWDTSLRAGVFGGGTKLTVL

SEQ ID NO: 683 - protein, 13 aa, Artificial Sequence
  source: /note="Description of Artificial Sequence: Synthetic light chain variable region CDR L1"
SGTSFNIGSNYVS

SEQ ID NO: 684 - DNA, 39 bp, Artificial Sequence
  source: /note="Description of Artificial Sequence: Synthetic light chain variable region CDR L1"
tctggaactagcttcaacattggcagtaattacgtatcc

SEQ ID NO: 685 - protein, 7 aa, Artificial Sequence
  source: /note="Description of Artificial Sequence: Synthetic light chain variable region CDR L2"
DNYKRPS

SEQ ID NO: 686 - DNA, 21 bp, Artificial Sequence
  source: /note="Description of Artificial Sequence: Synthetic light chain variable region CDR L2"
gacaattataagcgaccctca

SEQ ID NO: 687 - protein, 11 aa, Artificial Sequence
  source: /note="Description of Artificial Sequence: Synthetic light chain variable region CDR L3"
GTWDTSLRAGV

SEQ ID NO: 688 - DNA, 33 bp, Artificial Sequence
  source: /note="Description of Artificial Sequence: Synthetic light chain variable region CDR L3"
ggaacttgggacaccagcctgagagctggagtg

SEQ ID NO: 689 - DNA, 354 bp, Artificial Sequence
  source: /note="Description of Artificial Sequence: Synthetic heavy chain variable region"
caggtccagctggtgcagtctgggtctgaggtgaagaagcctggggcctcagtgaggctctcctgcaaggttgccggttacagcctcagtgagttatccatgcactgggtgcgacagtctcctggaaaagggcttgagtggttgggagcttttgaccatgaagatgctgaagcaatctatgcaccgaggttccagggcagaatcaccatgaccgcggacacatctacggacacagcctacatggaactgagcagcctgagatctgaggacacggccgtttattactgtgcaacaccgaccccagttggagctacggactactggggccagggaaccctggtcaccgtctcctca

SEQ ID NO: 690 - protein, 118 aa, Artificial Sequence
  source: /note="Description of Artificial Sequence: Synthetic heavy chain variable region"
QVQLVQSGSEVKKPGASVRLSCKVAGYSLSELSMHWVRQSPGKGLEWLGAFDHEDAEAIYAPRFQGRITMTADTSTDTAYMELSSLRSEDTAVYYCATPTPVGATDYWGQGTLVTVSS

SEQ ID NO: 691 - protein, 9 aa, Artificial Sequence
  source: /note="Description of Artificial Sequence: Synthetic heavy chain variable region CDR H1"
YSLSELSMH

SEQ ID NO: 692 - DNA, 27 bp, Artificial Sequence
  source: /note="Description of Artificial Sequence: Synthetic heavy chain variable region CDR H1"
tacagcctcagtgagttatccatgcac

SEQ ID NO: 693 - protein, 17 aa, Artificial Sequence
  source: /note="Description of Artificial Sequence: Synthetic heavy chain variable region CDR H2"
AFDHEDAEAIYAPRFQG

SEQ ID NO: 694 - DNA, 51 bp, Artificial Sequence
  source: /note="Description of Artificial Sequence: Synthetic heavy chain variable region CDR H2"
gcttttgaccatgaagatgctgaagcaatctatgcaccgaggttccagggc

SEQ ID NO: 695 - protein, 11 aa, Artificial Sequence
  source: /note="Description of Artificial Sequence: Synthetic heavy chain variable region CDR H3"
ATPTPVGATDY

SEQ ID NO: 696 - DNA, 33 bp, Artificial Sequence
  source: /note="Description of Artificial Sequence: Synthetic heavy chain variable region CDR H3"
gcaacaccgaccccagttggagctacggactac

SEQ ID NO: 697 - DNA, 321 bp, Artificial Sequence
  source: /note="Description of Artificial Sequence: Synthetic light chain variable region"
gacatccagatgacccagtctccatcctccctgtctgcatctgtaggagacagagtcaccatcacttgccgggcaagtcagagtattagtagttatttaaattggtatcaacaaaaaccaggaaaagcccctaagctcctgatctatgctgcatccagtttgcaaagggggggcccatcaagattcagtggcagtggatctgggacagatttcactctcaccatcagcagtctgcaacctgaagattttgcaacttactattgtcaacagagttacattattccgtacacttttggccaggggaccaaagtggatatcaaa

SEQ ID NO: 698 - protein, 107 aa, Artificial Sequence
  source: /note="Description of Artificial Sequence: Synthetic light chain variable region"
DIQMTQSPSSLSASVGDRVTITCRASQSISSYLNWYQQKPGKAPKLLIYAASSLQRGGPSRFSGSGSGTDFTLTISSLQPEDFATYYCQQSYIIPYTFGQGTKVDIK

SEQ ID NO: 699 - protein, 11 aa, Artificial Sequence
  source: /note="Description of Artificial Sequence: Synthetic light chain variable region CDR L1"
RASQSISSYLN

SEQ ID NO: 700 - DNA, 33 bp, Artificial Sequence
  source: /note="Description of Artificial Sequence: Synthetic light chain variable region CDR L1"
cgggcaagtcagagtattagtagttatttaaat

SEQ ID NO: 701 - protein, 7 aa, Artificial Sequence
  source: /note="Description of Artificial Sequence: Synthetic light chain variable region CDR L2"
AASSLQR

SEQ ID NO: 702 - DNA, 21 bp, Artificial Sequence
  source: /note="Description of Artificial Sequence: Synthetic light chain variable region CDR L2"
gctgcatccagtttgcaaagg

SEQ ID NO: 703 - protein, 9 aa, Artificial Sequence
  source: /note="Description of Artificial Sequence: Synthetic light chain variable region CDR L3"
QQSYIIPYT

SEQ ID NO: 704 - DNA, 27 bp, Artificial Sequence
  source: /note="Description of Artificial Sequence: Synthetic light chain variable region CDR L3"
caacagagttacattattccgtacact

SEQ ID NO: 705 - DNA, 360 bp, Artificial Sequence
  source: /note="Description of Artificial Sequence: Synthetic heavy chain variable region"
caggtgcagctgcaggagtccggcccaggacgggtgaagccttcggagaccctgtccctcacctgcagtgtcgctgatggctcaatcagtagtggtcattactactggggctgggtccgccagcccccagggaaggggctggagtggattgcgacaatccatgatagtggggccacgtactacaacccgtccctccagagtcgagtcaccatatccgtagacacgtccaagaaccagttctccctgaaagtgaattctgtgaccgccgcagacacggctgtctattactgtgcgagtcgaaggggcagtggctggtttttcgactcctggggccagggaaccctggtcaccgtctcctca

SEQ ID NO: 706 - protein, 120 aa, Artificial Sequence
  source: /note="Description of Artificial Sequence: Synthetic heavy chain variable region"
QVQLQESGPGRVKPSETLSLTCSVADGSISSGHYYWGWVRQPPGKGLEWIATIHDSGATYYNPSLQSRVTISVDTSKNQFSLKVNSVTAADTAVYYCASRRGSGWFFDSWGQGTLVTVSS

SEQ ID NO: 707 - protein, 11 aa, Artificial Sequence
  source: /note="Description of Artificial Sequence: Synthetic heavy chain variable region CDR H1"
GSISSGHYYWG

SEQ ID NO: 708 - DNA, 33 bp, Artificial Sequence
  source: /note="Description of Artificial Sequence: Synthetic heavy chain variable region CDR H1"
ggctcaatcagtagtggtcattactactggggc

SEQ ID NO: 709 - protein, 16 aa, Artificial Sequence
  source: /note="Description of Artificial Sequence: Synthetic heavy chain variable region CDR H2"
TIHDSGATYYNPSLQS

SEQ ID NO: 710 - DNA, 48 bp, Artificial Sequence
  source: /note="Description of Artificial Sequence: Synthetic heavy chain variable region CDR H2"
acaatccatgatagtggggccacgtactacaacccgtccctccagagt

SEQ ID NO: 711 - protein, 12 aa, Artificial Sequence
  source: /note="Description of Artificial Sequence: Synthetic heavy chain variable region CDR H3"
ASRRGSGWFFDS

SEQ ID NO: 712 - DNA, 36 bp, Artificial Sequence
  source: /note="Description of Artificial Sequence: Synthetic heavy chain variable region CDR H3"
gcgagtcgaaggggcagtggctggtttttcgactcc

SEQ ID NO: 713 - DNA, 327 bp, Artificial Sequence
  source: /note="Description of Artificial Sequence: Synthetic light chain variable region"
gatattgtgctgactcagtctccagccaccctgtctgtgtctccaggggaaagagtcaccctctcctgcagggccagtcacagtgttaactacaatttagcctggtaccagcagaaacctggtcaggctcccaggctcctcatctatggttcatctaccagggccactggtctcccagccaggttcagtggcagtgggtctgggacagagttcactctcaccatcagcagcctgcagtctgaagattttgcaatttattactgtcagcagtataataactggcctccgggaggcacttttggccaggggaccaaggtggaaatcaaa

SEQ ID NO: 714 - protein, 109 aa, Artificial Sequence
  source: /note="Description of Artificial Sequence: Synthetic light chain variable region"
DIVLTQSPATLSVSPGERVTLSCRASHSVNYNLAWYQQKPGQAPRLLIYGSSTRATGLPARFSGSGSGTEFTLTISSLQSEDFAIYYCQQYNNWPPGGTFGQGTKVEIK

SEQ ID NO: 715 - protein, 11 aa, Artificial Sequence
  source: /note="Description of Artificial Sequence: Synthetic light chain variable region CDR L1"
RASHSVNYNLA

SEQ ID NO: 716 - DNA, 33 bp, Artificial Sequence
  source: /note="Description of Artificial Sequence: Synthetic light chain variable region CDR L1"
agggccagtcacagtgttaactacaatttagcc

SEQ ID NO: 717 - protein, 7 aa, Artificial Sequence
  source: /note="Description of Artificial Sequence: Synthetic light chain variable region CDR L2"
GSSTRAT

SEQ ID NO: 718 - DNA, 21 bp, Artificial Sequence
  source: /note="Description of Artificial Sequence: Synthetic light chain variable region CDR L2"
ggttcatctaccagggccact

SEQ ID NO: 719 - protein, 11 aa, Artificial Sequence
  source: /note="Description of Artificial Sequence: Synthetic light chain variable region CDR L3"
QQYNNWPPGGT

SEQ ID NO: 720 - DNA, 33 bp, Artificial Sequence
  source: /note="Description of Artificial Sequence: Synthetic light chain variable region CDR L3"
cagcagtataataactggcctccgggaggcact

SEQ ID NO: 721 - DNA, 369 bp, Artificial Sequence
  source: /note="Description of Artificial Sequence: Synthetic heavy chain variable region"
gaggtgcagctgttggagtctgggggaggcctggtcaagcctggggggtccctgagactctcctgtgcagcctctggattcaccttcagtagctatagcatgaactgggtccgccaggctccagggaaggggctggagtgggtctcatccattagtagtagtagtagttacatatactacgcagactcagtgaagggccgattcaccatctccagagacaacgccaagaactcactgtatctgcaaatgaacagcctgagagccgaggacacggctgtgtattactgtgcgagagattggccgaatagcagctcgtcgccgaactggttcgacccctggggccagggaaccctggtcaccgtctcctca

SEQ ID NO: 722 - protein, 123 aa, Artificial Sequence
  source: /note="Description of Artificial Sequence: Synthetic heavy chain variable region"
EVQLLESGGGLVKPGGSLRLSCAASGFTFSSYSMNWVRQAPGKGLEWVSSISSSSSYIYYADSVKGRFTISRDNAKNSLYLQMNSLRAEDTAVYYCARDWPNSSSSPNWFDPWGQGTLVTVSS

SEQ ID NO: 723 - protein, 9 aa, Artificial Sequence
  source: /note="Description of Artificial Sequence: Synthetic heavy chain variable region CDR H1"
FTFSSYSMN

SEQ ID NO: 724 - DNA, 27 bp, Artificial Sequence
  source: /note="Description of Artificial Sequence: Synthetic heavy chain variable region CDR H1"
ttcaccttcagtagctatagcatgaac

SEQ ID NO: 725 - protein, 17 aa, Artificial Sequence
  source: /note="Description of Artificial Sequence: Synthetic heavy chain variable region CDR H2"
SISSSSSYIYYADSVKG

SEQ ID NO: 726 - DNA, 51 bp, Artificial Sequence
  source: /note="Description of Artificial Sequence: Synthetic heavy chain variable region CDR H2"
tccattagtagtagtagtagttacatatactacgcagactcagtgaagggc

SEQ ID NO: 727 - protein, 16 aa, Artificial Sequence
  source: /note="Description of Artificial Sequence: Synthetic heavy chain variable region CDR H3"
ARDWPNSSSSPNWFDP

SEQ ID NO: 728 - DNA, 48 bp, Artificial Sequence
  source: /note="Description of Artificial Sequence: Synthetic heavy chain variable region CDR H3"
gcgagagattggccgaatagcagctcgtcgccgaactggttcgacccc

SEQ ID NO: 729 - DNA, 336 bp, Artificial Sequence
  source: /note="Description of Artificial Sequence: Synthetic light chain variable region"
cagtctgtcctgacgcagccgccctcagtgtctggggccccagggcagagggtcaccatctcctgcactgggagcagctccaacatcggggcaggttatgatgtacactggtaccagcagcttccaggaacagcccccaaactcctcatctatggtaacagcaatcggccctcaggggtccctgaccgattctctggctccaagtctggcacctcagcctccctggccatcactgggctccaggctgaggatgaggctgattattactgccagtcctatgacagcagcctgagtggtttttatgtcttcggaactgggaccaagctcaccgtccta

SEQ ID NO: 730 - protein, 112 aa, Artificial Sequence
  source: /note="Description of Artificial Sequence: Synthetic light chain variable region"
QSVLTQPPSVSGAPGQRVTISCTGSSSNIGAGYDVHWYQQLPGTAPKLLIYGNSNRPSGVPDRFSGSKSGTSASLAITGLQAEDEADYYCQSYDSSLSGFYVFGTGTKLTVL

SEQ ID NO: 731 - protein, 14 aa, Artificial Sequence
  source: /note="Description of Artificial Sequence: Synthetic light chain variable region CDR L1"
TGSSSNIGAGYDVH

SEQ ID NO: 732 - DNA, 42 bp, Artificial Sequence; identical to SEQ ID NO: 572
  source: /note="Description of Artificial Sequence: Synthetic light chain variable region CDR L1"

SEQ ID NO: 733 - protein, 7 aa, Artificial Sequence
  source: /note="Description of Artificial Sequence: Synthetic light chain variable region CDR L2"
GNSNRPS

SEQ ID NO: 734 - DNA, 21 bp, Artificial Sequence
  source: /note="Description of Artificial Sequence: Synthetic light chain variable region CDR L2"
ggtaacagcaatcggccctca

SEQ ID NO: 735 - protein, 12 aa, Artificial Sequence
  source: /note="Description of Artificial Sequence: Synthetic light chain variable region CDR L3"
QSYDSSLSGFYV

SEQ ID NO: 736 - DNA, 36 bp, Artificial Sequence
  source: /note="Description of Artificial Sequence: Synthetic light chain variable region CDR L3"
cagtcctatgacagcagcctgagtggtttttatgtc

SEQ ID NO: 737 - DNA, 363 bp, Artificial Sequence
  source: /note="Description of Artificial Sequence: Synthetic heavy chain variable region"
caggtccagctggtacagtctggggcagaggtgaaaaagcccggggagtctctgaagatctcctgtcagggttctggatacagctttagcagtttctggatcgtctgggtgcgccagatgcccgggaaaggcctggagtggatggggagcatctatcctggtgactctgacaccagatacaccccgtccttccaaggccaggtcaccatctcagccgacaagtccaccagcaccgcctatttgcagtggaacagcctgaagccctcggacaccgccatgtattactgtgcgaggtgtagtctcagctgcgactactacggagtgaacctctggggccaagggaccacggtcaccgtctcctca

SEQ ID NO: 738 - protein, 121 aa, Artificial Sequence
  source: /note="Description of Artificial Sequence: Synthetic heavy chain variable region"
QVQLVQSGAEVKKPGESLKISCQGSGYSFSSFWIVWVRQMPGKGLEWMGSIYPGDSDTRYTPSFQGQVTISADKSTSTAYLQWNSLKPSDTAMYYCARCSLSCDYYGVNLWGQGTTVTVSS

SEQ ID NO: 739 - protein, 9 aa, Artificial Sequence
  source: /note="Description of Artificial Sequence: Synthetic heavy chain variable region CDR H1"
YSFSSFWIV

SEQ ID NO: 740 - DNA, 27 bp, Artificial Sequence
  source: /note="Description of Artificial Sequence: Synthetic heavy chain variable region CDR H1"
tacagctttagcagtttctggatcgtc

SEQ ID NO: 741 - protein, 17 aa, Artificial Sequence
  source: /note="Description of Artificial Sequence: Synthetic heavy chain variable region CDR H2"
SIYPGDSDTRYTPSFQG

SEQ ID NO: 742 - DNA, 51 bp, Artificial Sequence
  source: /note="Description of Artificial Sequence: Synthetic heavy chain variable region CDR H2"
agcatctatcctggtgactctgacaccagatacaccccgtccttccaaggc

SEQ ID NO: 743 - protein, 14 aa, Artificial Sequence
  source: /note="Description of Artificial Sequence: Synthetic heavy chain variable region CDR H3"
ARCSLSCDYYGVNL

SEQ ID NO: 744 - DNA, 42 bp, Artificial Sequence
  source: /note="Description of Artificial Sequence: Synthetic heavy chain variable region CDR H3"
gcgaggtgtagtctcagctgcgactactacggagtgaacctc

SEQ ID NO: 745 - DNA, 336 bp, Artificial Sequence
  source: /note="Description of Artificial Sequence: Synthetic light chain variable region"
cagtctgtggtgacgcagccgccctcagtgtctggggccccaggacagagggtcaccatctcctgctctgggagcagctccaacatcggggcacgttctgatgtacactggtaccagcagcttccaggaaaagcccccaaactcctcatctatggtaacaccaatcggcccttaggggtccctgaccgattctctggctccacgtctggcacctcagcctccctggccatctctgggctccaggctgaggatgagggatattattactgtcagtcctatgacagcagcctgagtggtttttatgtcttcggaactgggaccaagctcaccgtccta

SEQ ID NO: 746 - protein, 112 aa, Artificial Sequence
  source: /note="Description of Artificial Sequence: Synthetic light chain variable region"
QSVVTQPPSVSGAPGQRVTISCSGSSSNIGARSDVHWYQQLPGKAPKLLIYGNTNRPLGVPDRFSGSTSGTSASLAISGLQAEDEGYYYCQSYDSSLSGFYVFGTGTKLTVL

SEQ ID NO: 747 - protein, 14 aa, Artificial Sequence
  source: /note="Description of Artificial Sequence: Synthetic light chain variable region CDR L1"
SGSSSNIGARSDVH

SEQ ID NO: 748 - DNA, 42 bp, Artificial Sequence
  source: /note="Description of Artificial Sequence: Synthetic light chain variable region CDR L1"
tctgggagcagctccaacatcggggcacgttctgatgtacac

SEQ ID NO: 749 - protein, 7 aa, Artificial Sequence
  source: /note="Description of Artificial Sequence: Synthetic light chain variable region CDR L2"
GNTNRPL

SEQ ID NO: 750 - DNA, 21 bp, Artificial Sequence
  source: /note="Description of Artificial Sequence: Synthetic light chain variable region CDR L2"
ggtaacaccaatcggccctta

SEQ ID NO: 751 - protein, 12 aa, Artificial Sequence
  source: /note="Description of Artificial Sequence: Synthetic light chain variable region CDR L3"
QSYDSSLSGFYV

SEQ ID NO: 752 - DNA, 36 bp, Artificial Sequence; identical to SEQ ID NO: 736
  source: /note="Description of Artificial Sequence: Synthetic light chain variable region CDR L3"

SEQ ID NO: 753 - DNA, 363 bp, Artificial Sequence
  source: /note="Description of Artificial Sequence: Synthetic heavy chain variable region"
caggtgcagctggtggaatctgggggaggcgtggtccagcctgggaggtccctgagactctcctgtgcagcctctggattccccttcagtctctatgccatgcactgggtccgccaggctccaggcaaggggctggagtgggtggcatttatatcatatgatggaagtaataaatactatgcagactccgtgaagggccgattcaccatctccagagacagttccaagaacacgctgtatctgcaaatggacagcctgacacctgaagacacggctgtgtattactgtgcgaaacctatagtggggcctacaacgggttactttgactactggggcccgggaaccctggtcaccgtctcctca

SEQ ID NO: 754 - protein, 121 aa, Artificial Sequence
  source: /note="Description of Artificial Sequence: Synthetic heavy chain variable region"
QVQLVESGGGVVQPGRSLRLSCAASGFPFSLYAMHWVRQAPGKGLEWVAFISYDGSNKYYADSVKGRFTISRDSSKNTLYLQMDSLTPEDTAVYYCAKPIVGPTTGYFDYWGPGTLVTVSS

SEQ ID NO: 755 - protein, 9 aa, Artificial Sequence
  source: /note="Description of Artificial Sequence: Synthetic heavy chain variable region CDR H1"
FPFSLYAMH

SEQ ID NO: 756 - DNA, 27 bp, Artificial Sequence
  source: /note="Description of Artificial Sequence: Synthetic heavy chain variable region CDR H1"
ttccccttcagtctctatgccatgcac

SEQ ID NO: 757 - protein, 17 aa, Artificial Sequence
  source: /note="Description of Artificial Sequence: Synthetic heavy chain variable region CDR H2"
FISYDGSNKYYADSVKG

SEQ ID NO: 758 - DNA, 51 bp, Artificial Sequence
  source: /note="Description of Artificial Sequence: Synthetic heavy chain variable region CDR H2"
tttatatcatatgatggaagtaataaatactatgcagactccgtgaagggc

SEQ ID NO: 759 - protein, 14 aa, Artificial Sequence
  source: /note="Description of Artificial Sequence: Synthetic heavy chain variable region CDR H3"
AKPIVGPTTGYFDY

SEQ ID NO: 760 - DNA, 42 bp, Artificial Sequence
  source: /note="Description of Artificial Sequence: Synthetic heavy chain variable region CDR H3"
gcgaaacctatagtggggcctacaacgggttactttgactac

SEQ ID NO: 761 - DNA, 318 bp, Artificial Sequence
  source: /note="Description of Artificial Sequence: Synthetic light chain variable region"
gaaattgtgttgactcagtctccagccaccctgtctttgtctccaggggaaagagccaccctctcctgcagggccagtcagagtgttagcagctacttagcctggtaccaacagaaacctggccaggctcccaggctcctcatctatgatgcatccaacagggccactggcatcccagccaggttcagtggcagtgggtctgggacagacttcactctcaccatcagcagcctagagcctgaagattttgcagtttattactgtcagcagcgtagcaactggtacacttttggccaggggaccaaggtggaaatcaaa

SEQ ID NO: 762 - protein, 106 aa, Artificial Sequence
  source: /note="Description of Artificial Sequence: Synthetic light chain variable region"
EIVLTQSPATLSLSPGERATLSCRASQSVSSYLAWYQQKPGQAPRLLIYDASNRATGIPARFSGSGSGTDFTLTISSLEPEDFAVYYCQQRSNWYTFGQGTKVEIK

SEQ ID NO: 763 - protein, 11 aa, Artificial Sequence
  source: /note="Description of Artificial Sequence: Synthetic light chain variable region CDR L1"
RASQSVSSYLA

SEQ ID NO: 764 - DNA, 33 bp, Artificial Sequence
  source: /note="Description of Artificial Sequence: Synthetic light chain variable region CDR L1"
agggccagtcagagtgttagcagctacttagcc

SEQ ID NO: 765 - protein, 7 aa, Artificial Sequence
  source: /note="Description of Artificial Sequence: Synthetic light chain variable region CDR L2"
DASNRAT

SEQ ID NO: 766 - DNA, 21 bp, Artificial Sequence
  source: /note="Description of Artificial Sequence: Synthetic light chain variable region CDR L2"
gatgcatccaacagggccact

SEQ ID NO: 767 - protein, 8 aa, Artificial Sequence
  source: /note="Description of Artificial Sequence: Synthetic light chain variable region CDR L3"
QQRSNWYT

SEQ ID NO: 768 - DNA, 24 bp, Artificial Sequence
  source: /note="Description of Artificial Sequence: Synthetic light chain variable region CDR L3"
cagcagcgtagcaactggtacact

SEQ ID NO: 769 - DNA, 363 bp, Artificial Sequence
  source: /note="Description of Artificial Sequence: Synthetic heavy chain variable region"
gaggtgcagctggtggagtctggggctgaggtgaagaagcctggggcctcagtgaaggtctcctgccagacttctggttacacctttagtcatttcggtgtcacctggatacgacaggccccaggacaagggcttgagtggctgggatggatcagcgcttacaatggtaacacagactatgcagacaaactgcagggcagactcaccatgaccacagacacatccacgaacaccgcctacatggaattgaggagcctcagatctgacgacacggccgtctattactgtgcgagagatccccccgcatcagctgctgcgatgcttgactactggggccagggaaccctggtcaccgtctcctca

SEQ ID NO: 770 - protein, 121 aa, Artificial Sequence
  source: /note="Description of Artificial Sequence: Synthetic heavy chain variable region"
EVQLVESGAEVKKPGASVKVSCQTSGYTFSHFGVTWIRQAPGQGLEWLGWISAYNGNTDYADKLQGRLTMTTDTSTNTAYMELRSLRSDDTAVYYCARDPPASAAAMLDYWGQGTLVTVSS

SEQ ID NO: 771 - protein, 9 aa, Artificial Sequence
  source: /note="Description of Artificial Sequence: Synthetic heavy chain variable region CDR H1"
YTFSHFGVT

SEQ ID NO: 772 - DNA, 27 bp, Artificial Sequence
  source: /note="Description of Artificial Sequence: Synthetic heavy chain variable region CDR H1"
tacacctttagtcatttcggtgtcacc

SEQ ID NO: 773 - protein, 17 aa, Artificial Sequence
  source: /note="Description of Artificial Sequence: Synthetic heavy chain variable region CDR H2"
WISAYNGNTDYADKLQG

SEQ ID NO: 774 - DNA, 51 bp, Artificial Sequence
  source: /note="Description of Artificial Sequence: Synthetic heavy chain variable region CDR H2"
tggatcagcgcttacaatggtaacacagactatgcagacaaactgcagggc

SEQ ID NO: 775 - protein, 14 aa, Artificial Sequence
  source: /note="Description of Artificial Sequence: Synthetic heavy chain variable region CDR H3"
ARDPPASAAAMLDY

SEQ ID NO: 776 - DNA, 42 bp, Artificial Sequence
  source: /note="Description of Artificial Sequence: Synthetic heavy chain variable region CDR H3"
gcgagagatccccccgcatcagctgctgcgatgcttgactac

SEQ ID NO: 777 - DNA, 339 bp, Artificial Sequence
  source: /note="Description of Artificial Sequence: Synthetic light chain variable region"
gatattgtgatgactcagtctccactctccctggccgtcacccttggacagccggcctccatctcctgcaagtctagtcaaggcctcgaatacactgatggaaacacctacttgagttggtttcagcagaggccaggccaatctccaaggcgcctcatttataagatttctaaccgggactctggggttccagacagattcagcggcagtgggtcaggcactgatttcacactgagaatcagcagggtggaggctgaggatgttggggtttattactgcatgcaaggtacacacgggcggggaatctctttcggtcctgggaccaaagtggatatcaaa

SEQ ID NO: 778 - protein, 113 aa, Artificial Sequence
  source: /note="Description of Artificial Sequence: Synthetic light chain variable region"
DIVMTQSPLSLAVTLGQPASISCKSSQGLEYTDGNTYLSWFQQRPGQSPRRLIYKISNRDSGVPDRFSGSGSGTDFTLRISRVEAEDVGVYYCMQGTHGRGISFGPGTKVDIK

SEQ ID NO: 779 - protein, 16 aa, Artificial Sequence
  source: /note="Description of Artificial Sequence: Synthetic light chain variable region CDR L1"
KSSQGLEYTDGNTYLS

SEQ ID NO: 780 - DNA, 48 bp, Artificial Sequence
  source: /note="Description of Artificial Sequence: Synthetic light chain variable region CDR L1"
aagtctagtcaaggcctcgaatacactgatggaaacacctacttgagt

SEQ ID NO: 781 - protein, 7 aa, Artificial Sequence
  source: /note="Description of Artificial Sequence: Synthetic light chain variable region CDR L2"
KISNRDS

SEQ ID NO: 782 - DNA, 21 bp, Artificial Sequence
  source: /note="Description of Artificial Sequence: Synthetic light chain variable region CDR L2"
aagatttctaaccgggactct

SEQ ID NO: 783 - protein, 10 aa, Artificial Sequence
  source: /note="Description of Artificial Sequence: Synthetic light chain variable region CDR L3"
MQGTHGRGIS

SEQ ID NO: 784 - DNA, 30 bp, Artificial Sequence
  source: /note="Description of Artificial Sequence: Synthetic light chain variable region CDR L3"
atgcaaggtacacacgggcggggaatctct

SEQ ID NO: 785 - DNA, 363 bp, Artificial Sequence
  source: /note="Description of Artificial Sequence: Synthetic heavy chain variable region"
caggtgcagctggtgcagtctggggctgaagtgaagaagcctggggcctcagtgaaggtctcctgcaaggcttctggatacaccttcaccgactactttatacactgggtgcgccaggcccctggagaagggcttgagtggatgggttgggtcaaccctctcagtgacaacacaaaatattcacagaagtttcagggcagggtcaccatgagcacggacacgtccatcaccacggcctacatgtacctgagcaggctgcgatttgacgacacggccgtgtatttttgtgcgagccaatcttccccctataccccgggcgctctggacgtctggggccaagggaccacggtcaccgtctcctca

SEQ ID NO: 786 - protein, 121 aa, Artificial Sequence
  source: /note="Description of Artificial Sequence: Synthetic heavy chain variable region"
QVQLVQSGAEVKKPGASVKVSCKASGYTFTDYFIHWVRQAPGEGLEWMGWVNPLSDNTKYSQKFQGRVTMSTDTSITTAYMYLSRLRFDDTAVYFCASQSSPYTPGALDVWGQGTTVTVSS

SEQ ID NO: 787 - protein, 9 aa, Artificial Sequence
  source: /note="Description of Artificial Sequence: Synthetic heavy chain variable region CDR H1"
YTFTDYFIH

SEQ ID NO: 788 - DNA, 27 bp, Artificial Sequence
  source: /note="Description of Artificial Sequence: Synthetic heavy chain variable region CDR H1"
tacaccttcaccgactactttatacac

SEQ ID NO: 789 - protein, 17 aa, Artificial Sequence
  source: /note="Description of Artificial Sequence: Synthetic heavy chain variable region CDR H2"
WVNPLSDNTKYSQKFQG

SEQ ID NO: 790 - DNA, 51 bp, Artificial Sequence
  source: /note="Description of Artificial Sequence: Synthetic heavy chain variable region CDR H2"
tgggtcaaccctctcagtgacaacacaaaatattcacagaagtttcagggc

SEQ ID NO: 791 - protein, 14 aa, Artificial Sequence
  source: /note="Description of Artificial Sequence: Synthetic heavy chain variable region CDR H3"
ASQSSPYTPGALDV

SEQ ID NO: 792 - DNA, 42 bp, Artificial Sequence
  source: /note="Description of Artificial Sequence: Synthetic heavy chain variable region CDR H3"
gcgagccaatcttccccctataccccgggcgctctggacgtc

SEQ ID NO: 793 - DNA, 321 bp, Artificial Sequence
  source: /note="Description of Artificial Sequence: Synthetic light chain variable region"
gacatccagttgacccagtctccatcctccctgcctgcatctgtaggagacagagtcaccatcacttgccgggcaagtcagaacattgggaacaatttagcttggtatcagcagaaagcaggaagagcccccaaactcctgatctatagtgcgtctaatttccatagtggggtcccatcaagattcattggcagtggatctgggacagttttcactctcaccatcagcagtctgcaacctgaagattttgcaacctacttctgtcaacagagtttcactccccaattcactttcggccctgggaccaaggtggaaatcaaa

SEQ ID NO: 794 - protein, 107 aa, Artificial Sequence
  source: /note="Description of Artificial Sequence: Synthetic light chain variable region"
DIQLTQSPSSLPASVGDRVTITCRASQNIGNNLAWYQQKAGRAPKLLIYSASNFHSGVPSRFIGSGSGTVFTLTISSLQPEDFATYFCQQSFTPQFTFGPGTKVEIK

SEQ ID NO: 795 - protein, 11 aa, Artificial Sequence
  source: /note="Description of Artificial Sequence: Synthetic light chain variable region CDR L1"
RASQNIGNNLA

SEQ ID NO: 796 - DNA, 33 bp, Artificial Sequence
  source: /note="Description of Artificial Sequence: Synthetic light chain variable region CDR L1"
cgggcaagtcagaacattgggaacaatttagct

SEQ ID NO: 797 - protein, 7 aa, Artificial Sequence
  source: /note="Description of Artificial Sequence: Synthetic light chain variable region CDR L2"
SASNFHS

SEQ ID NO: 798 - DNA, 21 bp, Artificial Sequence
  source: /note="Description of Artificial Sequence: Synthetic light chain variable region CDR L2"
agtgcgtctaatttccatagt

SEQ ID NO: 799 - protein, 9 aa, Artificial Sequence
  source: /note="Description of Artificial Sequence: Synthetic light chain variable region CDR L3"
QQSFTPQFT

SEQ ID NO: 800 - DNA, 27 bp, Artificial Sequence
  source: /note="Description of Artificial Sequence: Synthetic light chain variable region CDR L3"
caacagagtttcactccccaattcact

SEQ ID NO: 801 - DNA, 384 bp, Artificial Sequence
  source: /note="Description of Artificial Sequence: Synthetic heavy chain variable region"
caggtccagctggtgcagtctggggctgaggtgaagaggcctgggtcctcggtgagggtctcctgcaaggcttctggaggcaccttcaggaagtatgctatcagttgggtgcgacaggcccgtggacaagggcttgagtggatgggaggcatcatccctatgtccggaccaccaagctacgcacagaagtttcagggcagagtcacgattaccgcggacgaatccacgagcacagtctacatggagctgagcagcctgagatttgaggacacggccgtgtatttctgtgcgagggatatcgagtggttcgtactcatggaccctatcacatcctactaccctatggacgtctggggccaagggaccacggtcaccgtctcctca

SEQ ID NO: 802 - protein, 128 aa, Artificial Sequence
  source: /note="Description of Artificial Sequence: Synthetic heavy chain variable region"
QVQLVQSGAEVKRPGSSVRVSCKASGGTFRKYAISWVRQARGQGLEWMGGIIPMSGPPSYAQKFQGRVTITADESTSTVYMELSSLRFEDTAVYFCARDIEWFVLMDPITSYYPMDVWGQGTTVTVSS

SEQ ID NO: 803 - protein, 9 aa, Artificial Sequence
  source: /note="Description of Artificial Sequence: Synthetic heavy chain variable region CDR H1"
GTFRKYAIS

SEQ ID NO: 804 - DNA, 27 bp, Artificial Sequence
  source: /note="Description of Artificial Sequence: Synthetic heavy chain variable region CDR H1"
ggcaccttcaggaagtatgctatcagt

SEQ ID NO: 805 - protein, 17 aa, Artificial Sequence
  source: /note="Description of Artificial Sequence: Synthetic heavy chain variable region CDR H2"
GIIPMSGPPSYAQKFQG

SEQ ID NO: 806 - DNA, 51 bp, Artificial Sequence
  source: /note="Description of Artificial Sequence: Synthetic heavy chain variable region CDR H2"
ggcatcatccctatgtccggaccaccaagctacgcacagaagtttcagggc

SEQ ID NO: 807 - protein, 21 aa, Artificial Sequence
  source: /note="Description of Artificial Sequence: Synthetic heavy chain variable region CDR H3"
ARDIEWFVLMDPITSYYPMDV

SEQ ID NO: 808 - DNA, 63 bp, Artificial Sequence
  source: /note="Description of Artificial Sequence: Synthetic heavy chain variable region CDR H3"
gcgagggatatcgagtggttcgtactcatggaccctatcacatcctactaccctatggacgtc

SEQ ID NO: 809 - DNA, 330 bp, Artificial Sequence
  source: /note="Description of Artificial Sequence: Synthetic light chain variable region"
cagtctgtggtgacccaggagccctcactgactgtgtccccaggagggacagtcactctcacctgtggctccagcactggaggtgtcaccagtggtcatcatacatactggttccagcagaagcctggccaagcccccaggacactgatctatgatacgaccaacacacactcctggacaccagcccggttcgcaggctccctccttgggggcaaagctgccctgaccctttcgggtgcgcagcctgaggatgaggctgactattactgcctcctctcctatagtggtgcgcggccggtgttcggcggagggaccaagctgaccgtccta

SEQ ID NO: 810 - protein, 110 aa, Artificial Sequence
  source: /note="Description of Artificial Sequence: Synthetic light chain variable region"
QSVVTQEPSLTVSPGGTVTLTCGSSTGGVTSGHHTYWFQQKPGQAPRTLIYDTTNTHSWTPARFAGSLLGGKAALTLSGAQPEDEADYYCLLSYSGARPVFGGGTKLTVL

SEQ ID NO: 811 - protein, 14 aa, Artificial Sequence
  source: /note="Description of Artificial Sequence: Synthetic light chain variable region CDR L1"
GSSTGGVTSGHHTY

SEQ ID NO: 812 - DNA, 42 bp, Artificial Sequence
  source: /note="Description of Artificial Sequence: Synthetic light chain variable region CDR L1"
ggctccagcactggaggtgtcaccagtggtcatcatacatac

SEQ ID NO: 813 - protein, 7 aa, Artificial Sequence
  source: /note="Description of Artificial Sequence: Synthetic light chain variable region CDR L2"
DTTNTHS

SEQ ID NO: 814 - DNA, 21 bp, Artificial Sequence
  source: /note="Description of Artificial Sequence: Synthetic light chain variable region CDR L2"
gatacgaccaacacacactcc

SEQ ID NO: 815 - protein, 10 aa, Artificial Sequence
  source: /note="Description of Artificial Sequence: Synthetic light chain variable region CDR L3"
LLSYSGARPV

SEQ ID NO: 816 - DNA, 30 bp, Artificial Sequence
  source: /note="Description of Artificial Sequence: Synthetic light chain variable region CDR L3"
ctcctctcctatagtggtgcgcggccggtg

SEQ ID NO: 817 - DNA, 384 bp, Artificial Sequence
  source: /note="Description of Artificial Sequence: Synthetic heavy chain variable region"
caggtgcagctggtgcagtctgggggaggcttggtcaagcctggagggtccctgagactctcctgtgcagcctctggattcaccttcaatgattactacatgaattggatccgccaggctccagggaaggggctggaatgggtttcatacattagtagtagtggtgagaccaaatactacgcagactctgtgaagggccgattcaccatctccagggacaacgccaagaactcactgtatctggaaatgaacagcctgagagtcgaggacacggccgtctactactgtgcgagagacgcggtcattgtagtaggaccggttgctgttcactaccaatactacgcggacgtctggggcaaagggaccacggtcaccgtctcttca

SEQ ID NO: 818 - protein, 128 aa, Artificial Sequence
  source: /note="Description of Artificial Sequence: Synthetic heavy chain variable region"
QVQLVQSGGGLVKPGGSLRLSCAASGFTFNDYYMNWIRQAPGKGLEWVSYISSSGETKYYADSVKGRFTISRDNAKNSLYLEMNSLRVEDTAVYYCARDAVIVVGPVAVHYQYYADVWGKGTTVTVSS

SEQ ID NO: 819 - protein, 9 aa, Artificial Sequence
  source: /note="Description of Artificial Sequence: Synthetic heavy chain variable region CDR H1"
FTFNDYYMN

SEQ ID NO: 820 - DNA, 27 bp, Artificial Sequence
  source: /note="Description of Artificial Sequence: Synthetic heavy chain variable region CDR H1"
ttcaccttcaatgattactacatgaat

SEQ ID NO: 821 - protein, 17 aa, Artificial Sequence
  source: /note="Description of Artificial Sequence: Synthetic heavy chain variable region CDR H2"
YISSSGETKYYADSVKG

SEQ ID NO: 822 - DNA, 51 bp, Artificial Sequence
  source: /note="Description of Artificial Sequence: Synthetic heavy chain variable region CDR H2"
tacattagtagtagtggtgagaccaaatactacgcagactctgtgaagggc

SEQ ID NO: 823 - protein, 21 aa, Artificial Sequence
  source: /note="Description of Artificial Sequence: Synthetic heavy chain variable region CDR H3"
ARDAVIVVGPVAVHYQYYADV

SEQ ID NO: 824 - DNA, 63 bp, Artificial Sequence
  source: /note="Description of Artificial Sequence: Synthetic heavy chain variable region CDR H3"
gcgagagacgcggtcattgtagtaggaccggttgctgttcactaccaatactacgcggacgtc

SEQ ID NO: 825 - DNA, 330 bp, Artificial Sequence
  source: /note="Description of Artificial Sequence: Synthetic light chain variable region"
cagccagtgctgactcagccaccctcagcgtctgggacccccgggcagagggtcaccatctcttgttctggaagcacctccaacatcggaagtaacactgtacactggtaccagcaactcccaggaacggcccccagactcctcatctatgttattaatcagcggccctcaggggtcccagaccgattctccggctccaagtctggcacctcagcctccctggccatcagtgggctccagtctgaggatgaggctgattattactgtgcagcatgggatgacagcctgaatggtccggtgttcggcggagggaccaagctcaccgtccta

SEQ ID NO: 826 - protein, 110 aa, Artificial Sequence
  source: /note="Description of Artificial Sequence: Synthetic light chain variable region"
QPVLTQPPSASGTPGQRVTISCSGSTSNIGSNTVHWYQQLPGTAPRLLIYVINQRPSGVPDRFSGSKSGTSASLAISGLQSEDEADYYCAAWDDSLNGPVFGGGTKLTVL

SEQ ID NO: 827 - protein, 13 aa, Artificial Sequence
  source: /note="Description of Artificial Sequence: Synthetic light chain variable region CDR L1"
SGSTSNIGSNTVH

SEQ ID NO: 828 - DNA, 39 bp, Artificial Sequence
  source: /note="Description of Artificial Sequence: Synthetic light chain variable region CDR L1"
tctggaagcacctccaacatcggaagtaacactgtacac

SEQ ID NO: 829 - protein, 7 aa, Artificial Sequence
  source: /note="Description of Artificial Sequence: Synthetic light chain variable region CDR L2"
VINQRPS

SEQ ID NO: 830 - DNA, 21 bp, Artificial Sequence
  source: /note="Description of Artificial Sequence: Synthetic light chain variable region CDR L2"
gttattaatcagcggccctca

SEQ ID NO: 831 - protein, 11 aa, Artificial Sequence
  source: /note="Description of Artificial Sequence: Synthetic light chain variable region CDR L3"
AAWDDSLNGPV

SEQ ID NO: 832 - DNA, 33 bp, Artificial Sequence
  source: /note="Description of Artificial Sequence: Synthetic light chain variable region CDR L3"
gcagcatgggatgacagcctgaatggtccggtg

SEQ ID NO: 833 - DNA, 375 bp, Artificial Sequence
  source: /note="Description of Artificial Sequence: Synthetic heavy chain variable region"
caggtccagcttgtgcagtctggggctgaggtgaagaagcctgggtcctcggtgaaggtctcctgcaaggcctctggaggcaccttcagcggctaccatatcagctgggtgcgacaggcccctggacaagggctcgagtggatgggagggatcatccatctatttgggacagttaactacgctccgaagttccagggcagagtcacgatcaccgcggacgcatccacgggcacagcctacatggagttaaacagcctgatgtctgaagacacggccgtttattattgtgcgagagatgcctacgaagtgtggactggttcttatctccccccttttgactactggggccagggaaccctggtcaccgtctcctca

SEQ ID NO: 834 - protein, 125 aa, Artificial Sequence
  source: /note="Description of Artificial Sequence: Synthetic heavy chain variable region"
QVQLVQSGAEVKKPGSSVKVSCKASGGTFSGYHISWVRQAPGQGLEWMGGIIHLFGTVNYAPKFQGRVTITADASTGTAYMELNSLMSEDTAVYYCARDAYEVWTGSYLPPFDYWGQGTLVTVSS

SEQ ID NO: 835 - protein, 9 aa, Artificial Sequence
  source: /note="Description of Artificial Sequence: Synthetic heavy chain variable region CDR H1"
GTFSGYHIS

SEQ ID NO: 836 - DNA, 27 bp, Artificial Sequence
  source: /note="Description of Artificial Sequence: Synthetic heavy chain variable region CDR H1"
ggcaccttcagcggctaccatatcagc

SEQ ID NO: 837 - protein, 17 aa, Artificial Sequence
  source: /note="Description of Artificial Sequence: Synthetic heavy chain variable region CDR H2"
GIIHLFGTVNYAPKFQG

SEQ ID NO: 838 - DNA, 51 bp, Artificial Sequence
  source: /note="Description of Artificial Sequence: Synthetic heavy chain variable region CDR H2"
gggatcatccatctatttgggacagttaactacgctccgaagttccagggc

SEQ ID NO: 839 - protein, 18 aa, Artificial Sequence
  source: /note="Description of Artificial Sequence: Synthetic heavy chain variable region CDR H3"
ARDAYEVWTGSYLPPFDY

SEQ ID NO: 840 - DNA, 54 bp, Artificial Sequence
  source: /note="Description of Artificial Sequence: Synthetic heavy chain variable region CDR H3"
gcgagagatgcctacgaagtgtggactggttcttatctccccccttttgactac

SEQ ID NO: 841 - DNA, 324 bp, Artificial Sequence
  source: /note="Description of Artificial Sequence: Synthetic light chain variable region"
gaaattgtgttgacacagtctccaggcaccctgtctttgtctcccggggaaagagtcaccctctcctgcagggccagtcagactgttacaagcagctacttagcctggtaccagcagaaacctggccaggctcccaggctcctcatctatggtgcattcaccagggccactgacatcccagacaggttcagtggcagtgggtctgggacagacttcactctcaccatcagcagactggagcctgaagattctgcagtatattattgtcagcagtatggtagctcattcctcactttcggcggagggaccaaagtggatatcaaa

SEQ ID NO: 842 - protein, 108 aa, Artificial Sequence
  source: /note="Description of Artificial Sequence: Synthetic light chain variable region"
EIVLTQSPGTLSLSPGERVTLSCRASQTVTSSYLAWYQQKPGQAPRLLIYGAFTRATDIPDRFSGSGSGTDFTLTISRLEPEDSAVYYCQQYGSSFLTFGGGTKVDIK

SEQ ID NO: 843 - protein, 12 aa, Artificial Sequence
  source: /note="Description of Artificial Sequence: Synthetic light chain variable region CDR L1"
RASQTVTSSYLA

SEQ ID NO: 844 - DNA, 36 bp, Artificial Sequence
  source: /note="Description of Artificial Sequence: Synthetic light chain variable region CDR L1"
agggccagtcagactgttacaagcagctacttagcc

SEQ ID NO: 845 - protein, 7 aa, Artificial Sequence
  source: /note="Description of Artificial Sequence: Synthetic light chain variable region CDR L2"
GAFTRAT

SEQ ID NO: 846 - DNA, 21 bp, Artificial Sequence
  source: /note="Description of Artificial Sequence: Synthetic light chain variable region CDR L2"
ggtgcattcaccagggccact

SEQ ID NO: 847 - protein, 9 aa, Artificial Sequence
  source: /note="Description of Artificial Sequence: Synthetic light chain variable region CDR L3"
QQYGSSFLT

SEQ ID NO: 848 - DNA, 27 bp, Artificial Sequence
  source: /note="Description of Artificial Sequence: Synthetic light chain variable region CDR L3"
cagcagtatggtagctcattcctcact

SEQ ID NO: 849 - DNA, 387 bp, Artificial Sequence
  source: /note="Description of Artificial Sequence: Synthetic heavy chain variable region"
gaggtgcagctggtggagtctgggggaggcttgcaaaagcccgggcggtccctgcgactctcatgttcagcttctggattcacctttggtgattatgctatgagctggttccgccaggctccagggaagggcctggagtgggttggtttcattagaagtaaagcttatgttgggaccgcagaatacgccgcgtctgtgaaaggcagattcaccatctcaagagatgattccaaaagcatcgcctatctgcacatgaacagcctgaagaccgaggacacagccgtgtattactgtactagagatgatattttgactggtttttatgaccgctcttactattacggtatacacgtctggggccaagggaccacggtcaccgtctcctca

SEQ ID NO: 850 - protein, 129 aa, Artificial Sequence
  source: /note="Description of Artificial Sequence: Synthetic heavy chain variable region"
EVQLVESGGGLQKPGRSLRLSCSASGFTFGDYAMSWFRQAPGKGLEWVGFIRSKAYVGTAEYAASVKGRFTISRDDSKSIAYLHMNSLKTEDTAVYYCTRDDILTGFYDRSYYYGIHVWGQGTTVTVSS

SEQ ID NO: 851 - protein, 9 aa, Artificial Sequence
  source: /note="Description of Artificial Sequence: Synthetic heavy chain variable region CDR H1"
FTFGDYAMS

SEQ ID NO: 852 - DNA, 27 bp, Artificial Sequence
  source: /note="Description of Artificial Sequence: Synthetic heavy chain variable region CDR H1"
ttcacctttggtgattatgctatgagc

SEQ ID NO: 853 - protein, 19 aa, Artificial Sequence
  source: /note="Description of Artificial Sequence: Synthetic heavy chain variable region CDR H2"
FIRSKAYVGTAEYAASVKG

SEQ ID NO: 854 - DNA, 57 bp, Artificial Sequence
  source: /note="Description of Artificial Sequence: Synthetic heavy chain variable region CDR H2"
ttcattagaagtaaagcttatgttgggaccgcagaatacgccgcgtctgtgaaaggc

SEQ ID NO: 855 - protein, 20 aa, Artificial Sequence
  source: /note="Description of Artificial Sequence: Synthetic heavy chain variable region CDR H3"
TRDDILTGFYDRSYYYGIHV

SEQ ID NO: 856 - DNA, 60 bp, Artificial Sequence
  source: /note="Description of Artificial Sequence: Synthetic heavy chain variable region CDR H3"
actagagatgatattttgactggtttttatgaccgctcttactattacggtatacacgtc

SEQ ID NO: 857 - DNA, 324 bp, Artificial Sequence
  source: /note="Description of Artificial Sequence: Synthetic light chain variable region"
gaaattgtaatgacgcagtctccagtcaccctgtctgtgtctccaggggaaagagccaccctctcctgcagggccagtcagagtgttaacagcaacttagcctggtaccagaagaaacctggccaggctcccaggctcctcatctatagtgcatccaccagggccactggtgtcccagccaggttcagtggcagtgggtctgggacagagttcactctcaccgtcagcagccttcagtctgaagattttgcagtttattactgtcagcagtatgataactggcctccgtacacttttggccaggggaccaaggtggaaatcaaa

SEQ ID NO: 858 - protein, 108 aa, Artificial Sequence
  source: /note="Description of Artificial Sequence: Synthetic light chain variable region"
EIVMTQSPVTLSVSPGERATLSCRASQSVNSNLAWYQKKPGQAPRLLIYSASTRATGVPARFSGSGSGTEFTLTVSSLQSEDFAVYYCQQYDNWPPYTFGQGTKVEIK

SEQ ID NO: 859 - protein, 11 aa, Artificial Sequence
  source: /note="Description of Artificial Sequence: Synthetic light chain variable region CDR L1"
RASQSVNSNLA

SEQ ID NO: 860 - DNA, 33 bp, Artificial Sequence
  source: /note="Description of Artificial Sequence: Synthetic light chain variable region CDR L1"
agggccagtcagagtgttaacagcaacttagcc

SEQ ID NO: 861 - protein, 7 aa, Artificial Sequence
  source: /note="Description of Artificial Sequence: Synthetic light chain variable region CDR L2"
SASTRAT

SEQ ID NO: 862 - DNA, 21 bp, Artificial Sequence
  source: /note="Description of Artificial Sequence: Synthetic light chain variable region CDR L2"
agtgcatccaccagggccact

SEQ ID NO: 863 - protein, 10 aa, Artificial Sequence
  source: /note="Description of Artificial Sequence: Synthetic light chain variable region CDR L3"
QQYDNWPPYT

SEQ ID NO: 864 - DNA, 30 bp, Artificial Sequence
  source: /note="Description of Artificial Sequence: Synthetic light chain variable region CDR L3"
cagcagtatgataactggcctccgtacact

SEQ ID NO: 865 - DNA, 381 bp, Artificial Sequence
  source: /note="Description of Artificial Sequence: Synthetic heavy chain variable region"
caggtgcagctgcaggagtcgggcccaggactggtgaggccttcacagaccctgtccctcacctgctccgcctctggtgcagccatcaatagtggtgattattactggagttggatccgccaggcccctgggaggggcctagagtggattgggtccatttccaaccgtggggtcaccgactacaacccgtccctcaagagtcgagttatcatatcagcggacacgtccaagaatcagttctccctgaggctgacctctgtgactgccacagacacggccgtgtattattgtgccagagatttgggtactttggcctttgatccctactactattacggtattgacgtctggggccaagggaccacggtcaccgtctcctca

SEQ ID NO: 866 - protein, 127 aa, Artificial Sequence
  source: /note="Description of Artificial Sequence: Synthetic heavy chain variable region"
QVQLQESGPGLVRPSQTLSLTCSASGAAINSGDYYWSWIRQAPGRGLEWIGSISNRGVTDYNPSLKSRVIISADTSKNQFSLRLTSVTATDTAVYYCARDLGTLAFDPYYYYGIDVWGQGTTVTVSS

SEQ ID NO: 867 - protein, 11 aa, Artificial Sequence
  source: /note="Description of Artificial Sequence: Synthetic heavy chain variable region CDR H1"
AAINSGDYYWS

SEQ ID NO: 868 - DNA, 33 bp, Artificial Sequence
  source: /note="Description of Artificial Sequence: Synthetic heavy chain variable region CDR H1"
gcagccatcaatagtggtgattattactggagt

SEQ ID NO: 869 - protein, 16 aa, Artificial Sequence
  source: /note="Description of Artificial Sequence: Synthetic heavy chain variable region CDR H2"
SISNRGVTDYNPSLKS

SEQ ID NO: 870 - DNA, 48 bp, Artificial Sequence
  source: /note="Description of Artificial Sequence: Synthetic heavy chain variable region CDR H2"
tccatttccaaccgtggggtcaccgactacaacccgtccctcaagagt

SEQ ID NO: 871 - protein, 19 aa, Artificial Sequence
  source: /note="Description of Artificial Sequence: Synthetic heavy chain variable region CDR H3"
ARDLGTLAFDPYYYYGIDV

SEQ ID NO: 872 - DNA, 57 bp, Artificial Sequence
  source: /note="Description of Artificial Sequence: Synthetic heavy chain variable region CDR H3"
gccagagatttgggtactttggcctttgatccctactactattacggtattgacgtc

SEQ ID NO: 873 - DNA, 318 bp, Artificial Sequence
  source: /note="Description of Artificial Sequence: Synthetic light chain variable region"
gacatccggatgacccagtctccagccaccctgtctttgtctccaggggaaagagccaccctctcctgcagggccagtcagagtgttagcaggcatttagcctggtaccaacaaaaacctggccaggctccccggctcctcatctatgatgcatcatacagggtcactggcgtcccagacaggttcagtggcagtgggtctgggacagacttcactctcaccatcagcagcctggagtctgaagattttgcaatttatttctgtcagcagcgtagcacctggccgacgttcggccaagggaccaaggtggaaatcaaa

SEQ ID NO: 874 - protein, 106 aa, Artificial Sequence
  source: /note="Description of Artificial Sequence: Synthetic light chain variable region"
DIRMTQSPATLSLSPGERATLSCRASQSVSRHLAWYQQKPGQAPRLLIYDASYRVTGVPDRFSGSGSGTDFTLTISSLESEDFAIYFCQQRSTWPTFGQGTKVEIK

SEQ ID NO: 875 - protein, 11 aa, Artificial Sequence
  source: /note="Description of Artificial Sequence: Synthetic light chain variable region CDR L1"
RASQSVSRHLA

SEQ ID NO: 876 - DNA, 33 bp, Artificial Sequence
  source: /note="Description of Artificial Sequence: Synthetic light chain variable region CDR L1"
agggccagtcagagtgttagcaggcatttagcc

SEQ ID NO: 877 - protein, 7 aa, Artificial Sequence
  source: /note="Description of Artificial Sequence: Synthetic light chain variable region CDR L2"
DASYRVT

SEQ ID NO: 878 - DNA, 21 bp, Artificial Sequence
  source: /note="Description of Artificial Sequence: Synthetic light chain variable region CDR L2"
gatgcatcatacagggtcact

SEQ ID NO: 879 - protein, 8 aa, Artificial Sequence
  source: /note="Description of Artificial Sequence: Synthetic light chain variable region CDR L3"
QQRSTWPT

SEQ ID NO: 880 - DNA, 24 bp, Artificial Sequence
  source: /note="Description of Artificial Sequence: Synthetic light chain variable region CDR L3"
cagcagcgtagcacctggccgacg

SEQ ID NO: 881 - DNA, 366 bp, Artificial Sequence
  source: /note="Description of Artificial Sequence: Synthetic heavy chain variable region"
caggtgcagctggtggaatctggggctgaggtgaagaagcctggggcctcagtgaaggttgcctgcacggcgtctggatacgccttcaccaattacaacatccactgggtgcgactggcccctggacagggacttgagtggatggcaattatcaaccccggtagtggtggcacagactactcagagaagttccagggcaggctcaccttgaccagtgacacgtccacgagcacggtgtacatgacgctgggcagcctgagatatgaagacacggccttttattactgtgcgagaaggggttaccctgattcggggagttacccccttgactactggggccagggaaccctggtcaccgtctcctca

SEQ ID NO: 882 - protein, 122 aa, Artificial Sequence
  source: /note="Description of Artificial Sequence: Synthetic heavy chain variable region"
QVQLVESGAEVKKPGASVKVACTASGYAFTNYNIHWVRLAPGQGLEWMAIINPGSGGTDYSEKFQGRLTLTSDTSTSTVYMTLGSLRYEDTAFYYCARRGYPDSGSYPLDYWGQGTLVTVSS

SEQ ID NO: 883 - protein, 9 aa, Artificial Sequence
  source: /note="Description of Artificial Sequence: Synthetic heavy chain variable region CDR H1"
YAFTNYNIH

SEQ ID NO: 884 - DNA, 27 bp, Artificial Sequence
  source: /note="Description of Artificial Sequence: Synthetic heavy chain variable region CDR H1"
tacgccttcaccaattacaacatccac

SEQ ID NO: 885 - protein, 17 aa, Artificial Sequence
  source: /note="Description of Artificial Sequence: Synthetic heavy chain variable region CDR H2"
IINPGSGGTDYSEKFQG

SEQ ID NO: 886 - DNA, 51 bp, Artificial Sequence
  source: /note="Description of Artificial Sequence: Synthetic heavy chain variable region CDR H2"
attatcaaccccggtagtggtggcacagactactcagagaagttccagggc

SEQ ID NO: 887 - protein, 15 aa, Artificial Sequence
  source: /note="Description of Artificial Sequence: Synthetic heavy chain variable region CDR H3"
ARRGYPDSGSYPLDY

SEQ ID NO: 888 - DNA, 45 bp, Artificial Sequence
  source: /note="Description of Artificial Sequence: Synthetic heavy chain variable region CDR H3"
gcgagaaggggttaccctgattcggggagttacccccttgactac

SEQ ID NO: 889 - DNA, 321 bp, Artificial Sequence
  source: /note="Description of Artificial Sequence: Synthetic light chain variable region"
gatattgtgatgacgcagtctccatcctccctgtctgcatctctgggagacagagtcaccatcacttgccgggcaggtcggagcattgccacttacttaaattggtatcagcagaaaccagggaaagcccctaagctcctgatctatggtgcatccagtttgcaaagtggcgtcccatcaaggttcagtggcagtggctctgggacacatttcactctcaccatcagcagtctgcaacctgaggattttgcaacttactactgtcaacagagttacatccgccctatcactttcggcggagggaccaaggtggagatcaaa

SEQ ID NO: 890 - protein, 107 aa, Artificial Sequence
  source: /note="Description of Artificial Sequence: Synthetic light chain variable region"
DIVMTQSPSSLSASLGDRVTITCRAGRSIATYLNWYQQKPGKAPKLLIYGASSLQSGVPSRFSGSGSGTHFTLTISSLQPEDFATYYCQQSYIRPITFGGGTKVEIK

SEQ ID NO: 891 - protein, 11 aa, Artificial Sequence
  source: /note="Description of Artificial Sequence: Synthetic light chain variable region CDR L1"
RAGRSIATYLN

SEQ ID NO: 892 - DNA, 33 bp, Artificial Sequence
  source: /note="Description of Artificial Sequence: Synthetic light chain variable region CDR L1"
cgggcaggtcggagcattgccacttacttaaat

SEQ ID NO: 893 - protein, 7 aa, Artificial Sequence
  source: /note="Description of Artificial Sequence: Synthetic light chain variable region CDR L2"
GASSLQS

SEQ ID NO: 894 - DNA, 21 bp, Artificial Sequence
  source: /note="Description of Artificial Sequence: Synthetic light chain variable region CDR L2"
ggtgcatccagtttgcaaagt

SEQ ID NO: 895 - protein, 9 aa, Artificial Sequence
  source: /note="Description of Artificial Sequence: Synthetic light chain variable region CDR L3"
QQSYIRPIT

SEQ ID NO: 896 - DNA, 27 bp, Artificial Sequence
  source: /note="Description of Artificial Sequence: Synthetic light chain variable region CDR L3"
caacagagttacatccgccctatcact

SEQ ID NO: 897 - DNA, 381 bp, Artificial Sequence
  source: /note="Description of Artificial Sequence: Synthetic heavy chain variable region"
caggtgcagctgcaggagtccggcccaggactggtgaagccttcacagaccctgtccctcacctgcactgtctctggtcgtctcctcagcagtggtgattactactggagttggatccgccagtccccagggaggggcctggagtggattggctacgtctatcacagtgggaccacctcgtacaacccgtccctcaagagtcgaattaccatgacagtggacacgtccaagaaccagttcaacctgaggttgacctctgtaacggccgcagacacggccgtgtattactgtgccagagatctcggatatagcagttcctctcccgccttttattacggtatagacttctggggcccagggaccatggtcaccgtctcttca

SEQ ID NO: 898 - protein, 127 aa, Artificial Sequence
  source: /note="Description of Artificial Sequence: Synthetic heavy chain variable region"
QVQLQESGPGLVKPSQTLSLTCTVSGRLLSSGDYYWSWIRQSPGRGLEWIGYVYHSGTTSYNPSLKSRITMTVDTSKNQFNLRLTSVTAADTAVYYCARDLGYSSSSPAFYYGIDFWGPGTMVTVSS

SEQ ID NO: 899 - protein, 11 aa, Artificial Sequence
  source: /note="Description of Artificial Sequence: Synthetic heavy chain variable region CDR H1"
RLLSSGDYYWS

SEQ ID NO: 900 - DNA, 33 bp, Artificial Sequence
  source: /note="Description of Artificial Sequence: Synthetic heavy chain variable region CDR H1"
cgtctcctcagcagtggtgattactactggagt

SEQ ID NO: 901 - protein, 16 aa, Artificial Sequence
  source: /note="Description of Artificial Sequence: Synthetic heavy chain variable region CDR H2"
YVYHSGTTSYNPSLKS

SEQ ID NO: 902 - DNA, 48 bp, Artificial Sequence
  source: /note="Description of Artificial Sequence: Synthetic heavy chain variable region CDR H2"
tacgtctatcacagtgggaccacctcgtacaacccgtccctcaagagt

SEQ ID NO: 903 - protein, 19 aa, Artificial Sequence
  source: /note="Description of Artificial Sequence: Synthetic heavy chain variable region CDR H3"
ARDLGYSSSSPAFYYGIDF

SEQ ID NO: 904 - DNA, 57 bp, Artificial Sequence
  source: /note="Description of Artificial Sequence: Synthetic heavy chain variable region CDR H3"
gccagagatctcggatatagcagttcctctcccgccttttattacggtatagacttc

SEQ ID NO: 905 - DNA, 321 bp, Artificial Sequence
  source: /note="Description of Artificial Sequence: Synthetic light chain variable region"
gaaattgtattgacacagtctccagccaccctgtctttgtctccagggcaaagagcgaccctctcctgcagggccagtcagagtgttggcaactacttagcctggtaccaacaaaaacctggccaggctcccaggctcctcatctatgatgcatccaacagggtcactggcatcccagccaggttcagtggcagtgggtctgggacagacttcactctcaccatcagcaggctagagtctgaagattttgcagtttattactgtcagcagcgtagcaacggggtcctcactttcggcggagggaccaaagtggatatcaaa

SEQ ID NO: 906 - protein, 107 aa, Artificial Sequence
  source: /note="Description of Artificial Sequence: Synthetic light chain variable region"
EIVLTQSPATLSLSPGQRATLSCRASQSVGNYLAWYQQKPGQAPRLLIYDASNRVTGIPARFSGSGSGTDFTLTISRLESEDFAVYYCQQRSNGVLTFGGGTKVDIK

SEQ ID NO: 907 - protein, 11 aa, Artificial Sequence
  source: /note="Description of Artificial Sequence: Synthetic light chain variable region CDR L1"
RASQSVGNYLA

SEQ ID NO: 908 - DNA, 33 bp, Artificial Sequence
  source: /note="Description of Artificial Sequence: Synthetic light chain variable region CDR L1"
agggccagtcagagtgttggcaactacttagcc

SEQ ID NO: 909 - protein, 7 aa, Artificial Sequence
  source: /note="Description of Artificial Sequence: Synthetic light chain variable region CDR L2"
DASNRVT

SEQ ID NO: 910 - DNA, 21 bp, Artificial Sequence
  source: /note="Description of Artificial Sequence: Synthetic light chain variable region CDR L2"
gatgcatccaacagggtcact

SEQ ID NO: 911 - protein, 9 aa, Artificial Sequence
  source: /note="Description of Artificial Sequence: Synthetic light chain variable region CDR L3"
QQRSNGVLT

SEQ ID NO: 912 - DNA, 27 bp, Artificial Sequence
  source: /note="Description of Artificial Sequence: Synthetic light chain variable region CDR L3"
cagcagcgtagcaacggggtcctcact

SEQ ID NO: 913 - DNA, 363 bp, Artificial Sequence
  source: /note="Description of Artificial Sequence: Synthetic heavy chain variable region"
gaggtgcagctgttggagtctggggctgaggtgaagaagcctggggcctcagtgagggtctcctgcaaggcttctggatacaccttcaccgactactttatgaactgggtgcgacaggcccctggagggggccttgagtggatggggtgggtcaatcctctcagtggagccacaaaatatgcacagaagtttcagggcagggtcaccatgaccacggacacgtccatcaccacagggtacctggacttgaggagcctgagagttgacgacacggccatctatttttgtgcgagccagtcttccccttacaccccgggcgctatgggcgtctggggccaagggaccacggtcaccgtctcttca

SEQ ID NO: 914 - protein, 121 aa, Artificial Sequence
  source: /note="Description of Artificial Sequence: Synthetic heavy chain variable region"
EVQLLESGAEVKKPGASVRVSCKASGYTFTDYFMNWVRQAPGGGLEWMGWVNPLSGATKYAQKFQGRVTMTTDTSITTGYLDLRSLRVDDTAIYFCASQSSPYTPGAMGVWGQGTTVTVSS

SEQ ID NO: 915 - protein, 9 aa, Artificial Sequence
  source: /note="Description of Artificial Sequence: Synthetic heavy chain variable region CDR H1"
YTFTDYFMN

SEQ ID NO: 916 - DNA, 27 bp, Artificial Sequence
  source: /note="Description of Artificial Sequence: Synthetic heavy chain variable region CDR H1"
tacaccttcaccgactactttatgaac

SEQ ID NO: 917 - protein, 17 aa, Artificial Sequence
  source: /note="Description of Artificial Sequence: Synthetic heavy chain variable region CDR H2"
WVNPLSGATKYAQKFQG

SEQ ID NO: 918 - DNA, 51 bp, Artificial Sequence
  source: /note="Description of Artificial Sequence: Synthetic heavy chain variable region CDR H2"
tgggtcaatcctctcagtggagccacaaaatatgcacagaagtttcagggc

SEQ ID NO: 919 - protein, 14 aa, Artificial Sequence
  source: /note="Description of Artificial Sequence: Synthetic heavy chain variable region CDR H3"
ASQSSPYTPGAMGV

SEQ ID NO: 920 - DNA, 42 bp, Artificial Sequence
  source: /note="Description of Artificial Sequence: Synthetic heavy chain variable region CDR H3"
gcgagccagtcttccccttacaccccgggcgctatgggcgtc

SEQ ID NO: 921 - DNA, 321 bp, Artificial Sequence
  source: /note="Description of Artificial Sequence: Synthetic light chain variable region"
gacatccaggtgacccagtctccatcctccctgtctgcctctgtaggagacagagtcaccatcacttgccgggcaagtcagagcattagcggctatttaagttggtatcagcagaaaccagggaaagcccctaacctcctgatctatgctacatccaatttatacagtggggtcccatcaaggttcagtggccgtgattctgggacagatttcactctcaccatcaccagtctgcaacctgaagattttgcaacttacttctgtcaactgaattccggtgccctattcactttcggccctgggaccaaggtggagatcaaa

SEQ ID NO: 922 - protein, 107 aa, Artificial Sequence
  source: /note="Description of Artificial Sequence: Synthetic light chain variable region"
DIQVTQSPSSLSASVGDRVTITCRASQSISGYLSWYQQKPGKAPNLLIYATSNLYSGVPSRFSGRDSGTDFTLTITSLQPEDFATYFCQLNSGALFTFGPGTKVEIK

SEQ ID NO: 923 - protein, 11 aa, Artificial Sequence
  source: /note="Description of Artificial Sequence: Synthetic light chain variable region CDR L1"
RASQSISGYLS

SEQ ID NO: 924 - DNA, 33 bp, Artificial Sequence
  source: /note="Description of Artificial Sequence: Synthetic light chain variable region CDR L1"
cgggcaagtcagagcattagcggctatttaagt

SEQ ID NO: 925 - protein, 7 aa, Artificial Sequence
  source: /note="Description of Artificial Sequence: Synthetic light chain variable region CDR L2"
ATSNLYS

SEQ ID NO: 926 - DNA, 21 bp, Artificial Sequence
  source: /note="Description of Artificial Sequence: Synthetic light chain variable region CDR L2"
gctacatccaatttatacagt

SEQ ID NO: 927 - protein, 9 aa, Artificial Sequence
  source: /note="Description of Artificial Sequence: Synthetic light chain variable region CDR L3"
QLNSGALFT

SEQ ID NO: 928 - DNA, 27 bp, Artificial Sequence
  source: /note="Description of Artificial Sequence: Synthetic light chain variable region CDR L3"
caactgaattccggtgccctattcact

SEQ ID NO: 929 - DNA, 384 bp, Artificial Sequence
  source: /note="Description of Artificial Sequence: Synthetic heavy chain variable region"
caggtgcagctgcaggagtcgggcccaggactggtgaagccttcacagaccctgtccctcacctgcactgtctctggtccctccatcagcgctggagattacaactggaattggatccgccaggccccagggaagggcctggagtgggttggatacatcgattacaggggcctcacccactacaacccgtccctcaagggtcgactttccatattaatggacaggtcggcgaaccagttctccctggagctgaattctgtgactgccgcagacacggccgtctactactgtgccagggacgtgggggtctatagtggctacgatgtctttcactactacggcatggacgtctggggccaggggaccacggtcaccgtctcctca

SEQ ID NO: 930 - protein, 128 aa, Artificial Sequence
  source: /note="Description of Artificial Sequence: Synthetic heavy chain variable region"
QVQLQESGPGLVKPSQTLSLTCTVSGPSISAGDYNWNWIRQAPGKGLEWVGYIDYRGLTHYNPSLKGRLSILMDRSANQFSLELNSVTAADTAVYYCARDVGVYSGYDVFHYYGMDVWGQGTTVTVSS

SEQ ID NO: 931 - protein, 11 aa, Artificial Sequence
  source: /note="Description of Artificial Sequence: Synthetic heavy chain variable region CDR H1"
PSISAGDYNWN

SEQ ID NO: 932 - DNA, 33 bp, Artificial Sequence
  source: /note="Description of Artificial Sequence: Synthetic heavy chain variable region CDR H1"
ccctccatcagcgctggagattacaactggaat

SEQ ID NO: 933 - protein, 16 aa, Artificial Sequence
  source: /note="Description of Artificial Sequence: Synthetic heavy chain variable region CDR H2"
YIDYRGLTHYNPSLKG

SEQ ID NO: 934 - DNA, 48 bp, Artificial Sequence
  source: /note="Description of Artificial Sequence: Synthetic heavy chain variable region CDR H2"
tacatcgattacaggggcctcacccactacaacccgtccctcaagggt

SEQ ID NO: 935 - protein, 20 aa, Artificial Sequence
  source: /note="Description of Artificial Sequence: Synthetic heavy chain variable region CDR H3"
ARDVGVYSGYDVFHYYGMDV

SEQ ID NO: 936 - DNA, 60 bp, Artificial Sequence
  source: /note="Description of Artificial Sequence: Synthetic heavy chain variable region CDR H3"
gccagggacgtgggggtctatagtggctacgatgtctttcactactacggcatggacgtc

SEQ ID NO: 937 - DNA, 327 bp, Artificial Sequence
  source: /note="Description of Artificial Sequence: Synthetic light chain variable region"
gaaacgacactcacgcagtctccagtcaccctgtctttgtctccaggggaaagagccaccctctcctgcagggccagtcagtatgttaggaacaactacttagcctggtaccaacacaaacctggccaggctcccaggctcctcatctatagtgcttccagcagggtcactggcaccccagacaggttcagtggcagtgggtctgggacagacttcactctcaccatcagcagactggagcctgaagactttgcagtgtattactgtcagcagtatggtggctcacctccggtcactttcggccctgggaccaaagtggatatcaaa

SEQ ID NO: 938 - protein, 109 aa, Artificial Sequence
  source: /note="Description of Artificial Sequence: Synthetic light chain variable region"
ETTLTQSPVTLSLSPGERATLSCRASQYVRNNYLAWYQHKPGQAPRLLIYSASSRVTGTPDRFSGSGSGTDFTLTISRLEPEDFAVYYCQQYGGSPPVTFGPGTKVDIK

SEQ ID NO: 939 - protein, 12 aa, Artificial Sequence
  source: /note="Description of Artificial Sequence: Synthetic light chain variable region CDR L1"
RASQYVRNNYLA

SEQ ID NO: 940 - DNA, 36 bp, Artificial Sequence
  source: /note="Description of Artificial Sequence: Synthetic light chain variable region CDR L1"
agggccagtcagtatgttaggaacaactacttagcc

SEQ ID NO: 941 - protein, 7 aa, Artificial Sequence
  source: /note="Description of Artificial Sequence: Synthetic light chain variable region CDR L2"
SASSRVT

SEQ ID NO: 942 - DNA, 21 bp, Artificial Sequence
  source: /note="Description of Artificial Sequence: Synthetic light chain variable region CDR L2"
agtgcttccagcagggtcact

SEQ ID NO: 943 - protein, 10 aa, Artificial Sequence
  source: /note="Description of Artificial Sequence: Synthetic light chain variable region CDR L3"
QQYGGSPPVT

SEQ ID NO: 944 - DNA, 30 bp, Artificial Sequence
  source: /note="Description of Artificial Sequence: Synthetic light chain variable region CDR L3"
cagcagtatggtggctcacctccggtcact

SEQ ID NO: 945 - DNA, 360 bp, Artificial Sequence
  source: /note="Description of Artificial Sequence: Synthetic heavy chain variable region"
gaggtgcagctgttggagtccgggggaggcttagttcagcctggggggtccctgagactatcctgtgcagcctctggattcaccttcagtaattactggatgcactgggtccgccaagctccagggaaggggctggtgtgggtctcacgtattagcggtgatggaagtgacacaacctacgcggactccgtggagggccgattcaccatctccagagacaacgccaggagtacactgtatcttcaactgaatagtctcacaggcgacgacacggctgtgtattattgtgcaagagatttgtggaccacctcgccctactttgacctctggggccagggaaccctggtcaccgtctcctca

SEQ ID NO: 946 - protein, 120 aa, Artificial Sequence
  source: /note="Description of Artificial Sequence: Synthetic heavy chain variable region"
EVQLLESGGGLVQPGGSLRLSCAASGFTFSNYWMHWVRQAPGKGLVWVSRISGDGSDTTYADSVEGRFTISRDNARSTLYLQLNSLTGDDTAVYYCARDLWTTSPYFDLWGQGTLVTVSS

SEQ ID NO: 947 - protein, 9 aa, Artificial Sequence
  source: /note="Description of Artificial Sequence: Synthetic heavy chain variable region CDR H1"
FTFSNYWMH

SEQ ID NO: 948 - DNA, 27 bp, Artificial Sequence
  source: /note="Description of Artificial Sequence: Synthetic heavy chain variable region CDR H1"
ttcaccttcagtaattactggatgcac

SEQ ID NO: 949 - protein, 17 aa, Artificial Sequence
  source: /note="Description of Artificial Sequence: Synthetic heavy chain variable region CDR H2"
RISGDGSDTTYADSVEG

SEQ ID NO: 950 - DNA, 51 bp, Artificial Sequence
  source: /note="Description of Artificial Sequence: Synthetic heavy chain variable region CDR H2"
cgtattagcggtgatggaagtgacacaacctacgcggactccgtggagggc

SEQ ID NO: 951 - protein, 13 aa, Artificial Sequence
  source: /note="Description of Artificial Sequence: Synthetic heavy chain variable region CDR H3"
ARDLWTTSPYFDL

SEQ ID NO: 952 - DNA, 39 bp, Artificial Sequence
  source: /note="Description of Artificial Sequence: Synthetic heavy chain variable region CDR H3"
gcaagagatttgtggaccacctcgccctactttgacctc

SEQ ID NO: 953 - DNA, 315 bp, Artificial Sequence
  source: /note="Description of Artificial Sequence: Synthetic light chain variable region"
gaaattgtattgacacagtctcctggcaccctgtctgcatctattggagacagagtcaccatcacttgccgggccagtcagagtcttaatggctggttggcctggtatcagcagaaaccagggaaagcccctaggctcctcatctataagtcgtctagtttagaaagcggggtcccatcaaggttcagcggcagtgcatctgggacagaattcactctcaccatcagcagcctgcagcctgacgattttgcaacttattactgccaacagtataatagttgggcgttcggccaagggaccaaggtggacgtcaaa

SEQ ID NO: 954 - protein, 105 aa, Artificial Sequence
  source: /note="Description of Artificial Sequence: Synthetic light chain variable region"
EIVLTQSPGTLSASIGDRVTITCRASQSLNGWLAWYQQKPGKAPRLLIYKSSSLESGVPSRFSGSASGTEFTLTISSLQPDDFATYYCQQYNSWAFGQGTKVDVK

SEQ ID NO: 955 - protein, 11 aa, Artificial Sequence
  source: /note="Description of Artificial Sequence: Synthetic light chain variable region CDR L1"
RASQSLNGWLA

SEQ ID NO: 956 - DNA, 33 bp, Artificial Sequence
  source: /note="Description of Artificial Sequence: Synthetic light chain variable region CDR L1"
cgggccagtcagagtcttaatggctggttggcc

SEQ ID NO: 957 - protein, 7 aa, Artificial Sequence
  source: /note="Description of Artificial Sequence: Synthetic light chain variable region CDR L2"
KSSSLES

SEQ ID NO: 958 - DNA, 21 bp, Artificial Sequence
  source: /note="Description of Artificial Sequence: Synthetic light chain variable region CDR L2"
aagtcgtctagtttagaaagc

SEQ ID NO: 959 - protein, 7 aa, Artificial Sequence
  source: /note="Description of Artificial Sequence: Synthetic light chain variable region CDR L3"
QQYNSWA

SEQ ID NO: 960 - DNA, 21 bp, Artificial Sequence
  source: /note="Description of Artificial Sequence: Synthetic light chain variable region CDR L3"
caacagtataatagttgggcg

SEQ ID NO: 961 - DNA, 378 bp, Artificial Sequence
  source: /note="Description of Artificial Sequence: Synthetic heavy chain variable region"
caggtgcagctacagcagtggggcgcaggactgttgaagccttcggagaccctgtccctcacctgcgctgtctatggtgggtccttcagtggttactcctggagctggatccgccagtccccagggaaggggctggagtggattggagaaatcaatcatagaggaagcaccaactacaacccgtccctcaagagtcgagtcaccatatcagtagacacgtcgaagaaccagttctccctgaagctgagctctgtgaccgccgcggacacggctgtgtactactgtgcggggaccaattatggagaggttaatacgagtaaccaatacttcttcggtatggacgtctggggccaagggaccacggtcaccgtctcctca

SEQ ID NO: 962 - protein, 126 aa, Artificial Sequence
  source: /note="Description of Artificial Sequence: Synthetic heavy chain variable region"
QVQLQQWGAGLLKPSETLSLTCAVYGGSFSGYSWSWIRQSPGKGLEWIGEINHRGSTNYNPSLKSRVTISVDTSKNQFSLKLSSVTAADTAVYYCAGTNYGEVNTSNQYFFGMDVWGQGTTVTVSS

SEQ ID NO: 963 - protein, 9 aa, Artificial Sequence
  source: /note="Description of Artificial Sequence: Synthetic heavy chain variable region CDR H1"
GSFSGYSWS

SEQ ID NO: 964 - DNA, 27 bp, Artificial Sequence
  source: /note="Description of Artificial Sequence: Synthetic heavy chain variable region CDR H1"
gggtccttcagtggttactcctggagc

SEQ ID NO: 965 - protein, 16 aa, Artificial Sequence
  source: /note="Description of Artificial Sequence: Synthetic heavy chain variable region CDR H2"
EINHRGSTNYNPSLKS

SEQ ID NO: 966 - DNA, 48 bp, Artificial Sequence; identical to SEQ ID NO: 6
  source: /note="Description of Artificial Sequence: Synthetic heavy chain variable region CDR H2"

SEQ ID NO: 967 - protein, 20 aa, Artificial Sequence
  source: /note="Description of Artificial Sequence: Synthetic heavy chain variable region CDR H3"
AGTNYGEVNTSNQYFFGMDV

SEQ ID NO: 968 - DNA, 60 bp, Artificial Sequence
  source: /note="Description of Artificial Sequence: Synthetic heavy chain variable region CDR H3"
gcggggaccaattatggagaggttaatacgagtaaccaatacttcttcggtatggacgtc

SEQ ID NO: 969 - DNA, 321 bp, Artificial Sequence
  source: /note="Description of Artificial Sequence: Synthetic light chain variable region"
gacatccggttgacccagtctccatcctccctgtctgcatctgtaggagacagagtcaccatcacttgccgggcaagtcagagcattaccacctatttaaattggtatcagcagaaaccagggaaagcccctaaactcctgatctatgctgcatccaatttggaaagtggggtcccatcaagtttcagtggcagtggatttgggacagacttcactctcaccatcagcagtctgcaacctgacgattttgcaacttactactgtcaacagagttacagtgccccgctcaccttcggcggagggaccaaagtggatatcaaa

SEQ ID NO: 970 - protein, 107 aa, Artificial Sequence
  source: /note="Description of Artificial Sequence: Synthetic light chain variable region"
DIRLTQSPSSLSASVGDRVTITCRASQSITTYLNWYQQKPGKAPKLLIYAASNLESGVPSSFSGSGFGTDFTLTISSLQPDDFATYYCQQSYSAPLTFGGGTKVDIK

SEQ ID NO: 971 - protein, 11 aa, Artificial Sequence
  source: /note="Description of Artificial Sequence: Synthetic light chain variable region CDR L1"
RASQSITTYLN

SEQ ID NO: 972 - DNA, 33 bp, Artificial Sequence
  source: /note="Description of Artificial Sequence: Synthetic light chain variable region CDR L1"
cgggcaagtcagagcattaccacctatttaaat

SEQ ID NO: 973 - protein, 7 aa, Artificial Sequence
  source: /note="Description of Artificial Sequence: Synthetic light chain variable region CDR L2"
AASNLES

SEQ ID NO: 974 - DNA, 21 bp, Artificial Sequence
  source: /note="Description of Artificial Sequence: Synthetic light chain variable region CDR L2"
gctgcatccaatttggaaagt

SEQ ID NO: 975 - protein, 9 aa, Artificial Sequence
  source: /note="Description of Artificial Sequence: Synthetic light chain variable region CDR L3"
QQSYSAPLT

SEQ ID NO: 976 - DNA, 27 bp, Artificial Sequence
  source: /note="Description of Artificial Sequence: Synthetic light chain variable region CDR L3"
caacagagttacagtgccccgctcacc

SEQ ID NO: 977 - DNA, 363 bp, Artificial Sequence
  source: /note="Description of Artificial Sequence: Synthetic heavy chain variable region"
caggtccagctggtacagtctggggctggggtgaagaagcctggggcctcagtgagggtctcatgcacggcctctggatacaccttcaccgactactttataaactgggtgcgacaggcccctggagggggccttgagtggatggggtgggtcaatcctctcagtggagccacaagatacgcccagaactttgcgggcagggtcaccatgaccacggacacgtccatcaccacaggatatctggacttacggaacctgcgacttgacgacacggccgtctatttttgtgcgagccagtcttcaccttacacgccgggcgctatggacgtctggggccaagggaccacggtcaccgtctcctca

SEQ ID NO: 978 - protein, 121 aa, Artificial Sequence
  source: /note="Description of Artificial Sequence: Synthetic heavy chain variable region"
QVQLVQSGAGVKKPGASVRVSCTASGYTFTDYFINWVRQAPGGGLEWMGWVNPLSGATRYAQNFAGRVTMTTDTSITTGYLDLRNLRLDDTAVYFCASQSSPYTPGAMDVWGQGTTVTVSS

SEQ ID NO: 979 - protein, 9 aa, Artificial Sequence
  source: /note="Description of Artificial Sequence: Synthetic heavy chain variable region CDR H1"
YTFTDYFIN

SEQ ID NO: 980 - DNA, 27 bp, Artificial Sequence
  source: /note="Description of Artificial Sequence: Synthetic heavy chain variable region CDR H1"
tacaccttcaccgactactttataaac

SEQ ID NO: 981 - protein, 17 aa, Artificial Sequence
  source: /note="Description of Artificial Sequence: Synthetic heavy chain variable region CDR H2"
WVNPLSGATRYAQNFAG

SEQ ID NO: 982 - DNA, 51 bp, Artificial Sequence
  source: /note="Description of Artificial Sequence: Synthetic heavy chain variable region CDR H2"
tgggtcaatcctctcagtggagccacaagatacgcccagaactttgcgggc

SEQ ID NO: 983 - protein, 14 aa, Artificial Sequence
  source: /note="Description of Artificial Sequence: Synthetic heavy chain variable region CDR H3"
ASQSSPYTPGAMDV

SEQ ID NO: 984 - DNA, 42 bp, Artificial Sequence
  source: /note="Description of Artificial Sequence: Synthetic heavy chain variable region CDR H3"
gcgagccagtcttcaccttacacgccgggcgctatggacgtc

SEQ ID NO: 985 - DNA, 321 bp, Artificial Sequence
  source: /note="Description of Artificial Sequence: Synthetic light chain variable region"
gatattgtgatgacccagtctccatcctccctgtctgcatctgtaggagacagagtctccatcacttgccggacaagtcagaccattagtggctatataagttggtatcagaagaaaccaggaaaagcccctaaactcctgatctatgctgcatcaaatatgtacagtggggtcccatcaaggttcagtggcagtgaatctgggacagatttcactctcaccatcaccagtctgcaacctgaagattttgcaacttacttctgtcaactgaattccggtgccctattcactttcggccctgggaccaaagtggatatcaaa

SEQ ID NO: 986 - protein, 107 aa, Artificial Sequence
  source: /note="Description of Artificial Sequence: Synthetic light chain variable region"
DIVMTQSPSSLSASVGDRVSITCRTSQTISGYISWYQKKPGKAPKLLIYAASNMYSGVPSRFSGSESGTDFTLTITSLQPEDFATYFCQLNSGALFTFGPGTKVDIK

SEQ ID NO: 987 - protein, 11 aa, Artificial Sequence
  source: /note="Description of Artificial Sequence: Synthetic light chain variable region CDR L1"
RTSQTISGYIS

SEQ ID NO: 988 - DNA, 33 bp, Artificial Sequence
  source: /note="Description of Artificial Sequence: Synthetic light chain variable region CDR L1"
cggacaagtcagaccattagtggctatataagt

SEQ ID NO: 989 - protein, 7 aa, Artificial Sequence
  source: /note="Description of Artificial Sequence: Synthetic light chain variable region CDR L2"
AASNMYS

SEQ ID NO: 990 - DNA, 21 bp, Artificial Sequence
  source: /note="Description of Artificial Sequence: Synthetic light chain variable region CDR L2"
gctgcatcaaatatgtacagt

SEQ ID NO: 991 - protein, 9 aa, Artificial Sequence
  source: /note="Description of Artificial Sequence: Synthetic light chain variable region CDR L3"
QLNSGALFT

SEQ ID NO: 992 - DNA, 27 bp, Artificial Sequence
  source: /note="Description of Artificial Sequence: Synthetic light chain variable region CDR L3"
caactgaattccggtgccctattcact

SEQ ID NO: 993 - DNA, 357 bp, Artificial Sequence
  source: /note="Description of Artificial Sequence: Synthetic heavy chain variable region"
gaggtgcagctggtggagtctgcagcagaggtgaaaaagcccggggagtctctgaagatctcctgtaagggttctggatacagttttgccagccactggatcggttgggtccgccaaatgcccgggaaaggcctggagttgatgggattcatctatcctggtgactctgataccagatacaacccgtccttccaaggccaggtcaccatctcagccgacaagtccatcagcaccgcctacctgcagtggaccaggctgaaggcctcggacaccgccatgtactactgtggccaggcagtggcggggggtgaatatttccaccactggggccagggcaccctggtcaccgtctcctca

SEQ ID NO: 994 - protein, 119 aa, Artificial Sequence
  source: /note="Description of Artificial Sequence: Synthetic heavy chain variable region"
EVQLVESAAEVKKPGESLKISCKGSGYSFASHWIGWVRQMPGKGLELMGFIYPGDSDTRYNPSFQGQVTISADKSISTAYLQWTRLKASDTAMYYCGQAVAGGEYFHHWGQGTLVTVSS

SEQ ID NO: 995 - protein, 9 aa, Artificial Sequence
  source: /note="Description of Artificial Sequence: Synthetic heavy chain variable region CDR H1"
YSFASHWIG

SEQ ID NO: 996 - DNA, 27 bp, Artificial Sequence
  source: /note="Description of Artificial Sequence: Synthetic heavy chain variable region CDR H1"
tacagttttgccagccactggatcggt

SEQ ID NO: 997 - protein, 17 aa, Artificial Sequence
  source: /note="Description of Artificial Sequence: Synthetic heavy chain variable region CDR H2"
FIYPGDSDTRYNPSFQG

SEQ ID NO: 998 - DNA, 51 bp, Artificial Sequence
  source: /note="Description of Artificial Sequence: Synthetic heavy chain variable region CDR H2"
ttcatctatcctggtgactctgataccagatacaacccgtccttccaaggc

SEQ ID NO: 999 - protein, 12 aa, Artificial Sequence
  source: /note="Description of Artificial Sequence: Synthetic heavy chain variable region CDR H3"
GQAVAGGEYFHH

SEQ ID NO: 1000 - DNA, 36 bp, Artificial Sequence
  source: /note="Description of Artificial Sequence: Synthetic heavy chain variable region CDR H3"
ggccaggcagtggcggggggtgaatatttccaccac

SEQ ID NO: 1001 - DNA, 321 bp, Artificial Sequence
  source: /note="Description of Artificial Sequence: Synthetic light chain variable region"
gatattgtgatgacgcagtctccagccaccctgtctgtgtctccaggggaaagagccaccctctcctgcagggccagtcagagtcttggcagcgacttagcctggtaccagcagaaacctggccagactcccaggctcctcatctatgatgcatccaccagggccactggtatcccagccaggttcagtggcagtgggtctgggacagagttcactctcaccatcagcagcctgcagtctgaagattttgcagtttattactgtcagcactataataattggccccgggggttcggccaagggaccaaggtggaaatcaaa

SEQ ID NO: 1002 - protein, 107 aa, Artificial Sequence
  source: /note="Description of Artificial Sequence: Synthetic light chain variable region"
DIVMTQSPATLSVSPGERATLSCRASQSLGSDLAWYQQKPGQTPRLLIYDASTRATGIPARFSGSGSGTEFTLTISSLQSEDFAVYYCQHYNNWPRGFGQGTKVEIK

SEQ ID NO: 1003 - protein, 11 aa, Artificial Sequence
  source: /note="Description of Artificial Sequence: Synthetic light chain variable region CDR L1"
RASQSLGSDLA

SEQ ID NO: 1004 - DNA, 33 bp, Artificial Sequence
  source: /note="Description of Artificial Sequence: Synthetic light chain variable region CDR L1"
agggccagtcagagtcttggcagcgacttagcc

SEQ ID NO: 1005 - protein, 7 aa, Artificial Sequence
  source: /note="Description of Artificial Sequence: Synthetic light chain variable region CDR L2"
DASTRAT

SEQ ID NO: 1006 - DNA, 21 bp, Artificial Sequence
  source: /note="Description of Artificial Sequence: Synthetic light chain variable region CDR L2"
gatgcatccaccagggccact

SEQ ID NO: 1007 - protein, 9 aa, Artificial Sequence
  source: /note="Description of Artificial Sequence: Synthetic light chain variable region CDR L3"
QHYNNWPRG

SEQ ID NO: 1008 - DNA, 27 bp, Artificial Sequence
  source: /note="Description of Artificial Sequence: Synthetic light chain variable region CDR L3"
cagcactataataattggccccggggg

SEQ ID NO: 1009 - DNA, 372 bp, Artificial Sequence
  source: /note="Description of Artificial Sequence: Synthetic heavy chain variable region"
caggtgcagctgcaggagtcgggcccaggacgggtgaagccttcacagaccctgtccctcacctgcactgtctctggtgtctccgtcaccattaatgattactactggacttggctccgccagtccccagggaaaggcctggagtggattggaaacatctataacagtgggagcacctaccagaacccgtccctccagagtcgagttaccatgtcagtggacacggccaagaaccacttctccctgaagctgacctctgtcactgccgcagatacggccgtctattactgtgccagagatttaggcactgccaacaactactacttcggtatggacgtctggggcctagggaccacggtcaccgtctcctca

SEQ ID NO: 1010 - protein, 124 aa, Artificial Sequence
  source: /note="Description of Artificial Sequence: Synthetic heavy chain variable region"
QVQLQESGPGRVKPSQTLSLTCTVSGVSVTINDYYWTWLRQSPGKGLEWIGNIYNSGSTYQNPSLQSRVTMSVDTAKNHFSLKLTSVTAADTAVYYCARDLGTANNYYFGMDVWGLGTTVTVSS

SEQ ID NO: 1011 - protein, 11 aa, Artificial Sequence
  source: /note="Description of Artificial Sequence: Synthetic heavy chain variable region CDR H1"
VSVTINDYYWT

SEQ ID NO: 1012 - DNA, 33 bp, Artificial Sequence
  source: /note="Description of Artificial Sequence: Synthetic heavy chain variable region CDR H1"
gtctccgtcaccattaatgattactactggact

SEQ ID NO: 1013 - protein, 16 aa, Artificial Sequence
  source: /note="Description of Artificial Sequence: Synthetic heavy chain variable region CDR H2"
NIYNSGSTYQNPSLQS

SEQ ID NO: 1014 - DNA, 48 bp, Artificial Sequence
  source: /note="Description of Artificial Sequence: Synthetic heavy chain variable region CDR H2"
aacatctataacagtgggagcacctaccagaacccgtccctccagagt

SEQ ID NO: 1015 - protein, 16 aa, Artificial Sequence
  source: /note="Description of Artificial Sequence: Synthetic heavy chain variable region CDR H3"
ARDLGTANNYYFGMDV

SEQ ID NO: 1016 - DNA, 48 bp, Artificial Sequence
  source: /note="Description of Artificial Sequence: Synthetic heavy chain variable region CDR H3"
gccagagatttaggcactgccaacaactactacttcggtatggacgtc

SEQ ID NO: 1017 - DNA, 324 bp, Artificial Sequence
  source: /note="Description of Artificial Sequence: Synthetic light chain variable region"
gaaattgtgatgacgcagtctccagccaccctgtctttgtctccaggggaaagagccactctctcctgcagggccagtcagagtgttagcacctacttagcctggtaccaacagaaacctggccaggctcccaggctcctcatctataatggatccaacagggtcactggcaccccagccaggttcagtggcagtgggtctgggacagacttcactctcaccatcagcagcgtagagcctgaagattttgcagtttattactgtcagcagcgtagcaactggcctccgtacacttttggccaggggaccaaggtggagatcaaa

SEQ ID NO: 1018 - protein, 108 aa, Artificial Sequence
  source: /note="Description of Artificial Sequence: Synthetic light chain variable region"
EIVMTQSPATLSLSPGERATLSCRASQSVSTYLAWYQQKPGQAPRLLIYNGSNRVTGTPARFSGSGSGTDFTLTISSVEPEDFAVYYCQQRSNWPPYTFGQGTKVEIK

SEQ ID NO: 1019 - protein, 11 aa, Artificial Sequence
  source: /note="Description of Artificial Sequence: Synthetic light chain variable region CDR L1"
RASQSVSTYLA

SEQ ID NO: 1020 - DNA, 33 bp, Artificial Sequence
  source: /note="Description of Artificial Sequence: Synthetic light chain variable region CDR L1"
agggccagtcagagtgttagcacctacttagcc

SEQ ID NO: 1021 - protein, 7 aa, Artificial Sequence
  source: /note="Description of Artificial Sequence: Synthetic light chain variable region CDR L2"
NGSNRVT

SEQ ID NO: 1022 - DNA, 21 bp, Artificial Sequence
  source: /note="Description of Artificial Sequence: Synthetic light chain variable region CDR L2"
aatggatccaacagggtcact

SEQ ID NO: 1023 - protein, 10 aa, Artificial Sequence
  source: /note="Description of Artificial Sequence: Synthetic light chain variable region CDR L3"
QQRSNWPPYT

SEQ ID NO: 1024 - DNA, 30 bp, Artificial Sequence
  source: /note="Description of Artificial Sequence: Synthetic light chain variable region CDR L3"
cagcagcgtagcaactggcctccgtacact

SEQ ID NO: 1025 - DNA, 381 bp, Artificial Sequence
  source: /note="Description of Artificial Sequence: Synthetic heavy chain variable region"
caggtgcagctgcaggagtcgggcccaggactggtgaagccttcggagaccctgtccctcacctgctcggtctctggtgcctccgtcaccagtagggaatactactggggctggatccgccaggcccccgggaagggtctgcagtggattgccagcattcatcacagtccttttcaaagtgacggcaacccgtccctgacgagtcgcgtctccagttccgtagtcacgtccaagaaccagttggccctgaggctgagctctgtgaccgccgcagacacggctgtatattactgtgcgggcgcgttttgggaggtttggactggcctttattcaccgccgtttgacttttggggccagggaatcctggtcaccgtctcctca

SEQ ID NO: 1026 - protein, 127 aa, Artificial Sequence
  source: /note="Description of Artificial Sequence: Synthetic heavy chain variable region"
QVQLQESGPGLVKPSETLSLTCSVSGASVTSREYYWGWIRQAPGKGLQWIASIHHSPFQSDGNPSLTSRVSSSVVTSKNQLALRLSSVTAADTAVYYCAGAFWEVWTGLYSPPFDFWGQGILVTVSS

SEQ ID NO: 1027 - protein, 11 aa, Artificial Sequence
  source: /note="Description of Artificial Sequence: Synthetic heavy chain variable region CDR H1"
ASVTSREYYWG

SEQ ID NO: 1028 - DNA, 33 bp, Artificial Sequence
  source: /note="Description of Artificial Sequence: Synthetic heavy chain variable region CDR H1"
gcctccgtcaccagtagggaatactactggggc

SEQ ID NO: 1029 - protein, 17 aa, Artificial Sequence
  source: /note="Description of Artificial Sequence: Synthetic heavy chain variable region CDR H2"
SIHHSPFQSDGNPSLTS

SEQ ID NO: 1030 - DNA, 51 bp, Artificial Sequence
  source: /note="Description of Artificial Sequence: Synthetic heavy chain variable region CDR H2"
agcattcatcacagtccttttcaaagtgacggcaacccgtccctgacgagt

SEQ ID NO: 1031 - protein, 18 aa, Artificial Sequence
  source: /note="Description of Artificial Sequence: Synthetic heavy chain variable region CDR H3"
AGAFWEVWTGLYSPPFDF

SEQ ID NO: 1032 - DNA, 54 bp, Artificial Sequence
  source: /note="Description of Artificial Sequence: Synthetic heavy chain variable region CDR H3"
gcgggcgcgttttgggaggtttggactggcctttattcaccgccgtttgacttt

SEQ ID NO: 1033 - DNA, 324 bp, Artificial Sequence
  source: /note="Description of Artificial Sequence: Synthetic light chain variable region"
gaaattgtaatgacacagtctccagggaccctgtctttgtctccaggggaaagagccaccctctcctgctgggccagtcagactgttagcagcggctacttagcctggtaccagcagaaacctggccaggctcccaggctcctcatctatggtgcatctaccagggccactgacatcccagacaggttcagtggcagtgggtctgggacaggcttcactctcaccatcagcagactggagcctgaagatcttgcagtctattactgtcagcagtatagcagttcaccactcactttcggcggcgggaccaaggtggaaatcaaa

SEQ ID NO: 1034 - protein, 108 aa, Artificial Sequence
  source: /note="Description of Artificial Sequence: Synthetic light chain variable region"
EIVMTQSPGTLSLSPGERATLSCWASQTVSSGYLAWYQQKPGQAPRLLIYGASTRATDIPDRFSGSGSGTGFTLTISRLEPEDLAVYYCQQYSSSPLTFGGGTKVEIK

SEQ ID NO: 1035 - protein, 12 aa, Artificial Sequence
  source: /note="Description of Artificial Sequence: Synthetic light chain variable region CDR L1"
WASQTVSSGYLA

SEQ ID NO: 1036 - DNA, 36 bp, Artificial Sequence
  source: /note="Description of Artificial Sequence: Synthetic light chain variable region CDR L1"
tgggccagtcagactgttagcagcggctacttagcc

SEQ ID NO: 1037 - protein, 7 aa, Artificial Sequence
  source: /note="Description of Artificial Sequence: Synthetic light chain variable region CDR L2"
GASTRAT

SEQ ID NO: 1038 - DNA, 21 bp, Artificial Sequence
  source: /note="Description of Artificial Sequence: Synthetic light chain variable region CDR L2"
ggtgcatctaccagggccact

SEQ ID NO: 1039 - protein, 9 aa, Artificial Sequence
  source: /note="Description of Artificial Sequence: Synthetic light chain variable region CDR L3"
QQYSSSPLT

SEQ ID NO: 1040 - DNA, 27 bp, Artificial Sequence
  source: /note="Description of Artificial Sequence: Synthetic light chain variable region CDR L3"
cagcagtatagcagttcaccactcact

SEQ ID NO: 1041 - DNA, 363 bp, Artificial Sequence
  source: /note="Description of Artificial Sequence: Synthetic heavy chain variable region"
caggtgcagctggtgcagtctggagctgaggtgaagaagcctggggcctcagtgaaggtctcgtgcaagacttctggttacaccttttccaactacggtatcagctggctgcgacaggcccctggacaagggcttgagtggatggcatggatcagcccttataatgggaacacaaagtctgcacagaggtttcagggcagagtcatcatgaccacagacacatccacgaggacagcccacatggaggtgaagagcctgagaactgacgacacggccacatattactgtgcgagagatccagcagtcgatgcaataccgatgcttgactactggggccagggaaccacggtcaccgtctcctca

SEQ ID NO: 1042 - protein, 121 aa, Artificial Sequence
  source: /note="Description of Artificial Sequence: Synthetic heavy chain variable region"
QVQLVQSGAEVKKPGASVKVSCKTSGYTFSNYGISWLRQAPGQGLEWMAWISPYNGNTKSAQRFQGRVIMTTDTSTRTAHMEVKSLRTDDTATYYCARDPAVDAIPMLDYWGQGTTVTVSS

SEQ ID NO: 1043 - protein, 9 aa, Artificial Sequence
  source: /note="Description of Artificial Sequence: Synthetic heavy chain variable region CDR H1"
YTFSNYGIS

SEQ ID NO: 1044 - DNA, 27 bp, Artificial Sequence
  source: /note="Description of Artificial Sequence: Synthetic heavy chain variable region CDR H1"
tacaccttttccaactacggtatcagc

SEQ ID NO: 1045 - protein, 17 aa, Artificial Sequence
  source: /note="Description of Artificial Sequence: Synthetic heavy chain variable region CDR H2"
WISPYNGNTKSAQRFQG

SEQ ID NO: 1046 - DNA, 51 bp, Artificial Sequence
  source: /note="Description of Artificial Sequence: Synthetic heavy chain variable region CDR H2"
tggatcagcccttataatgggaacacaaagtctgcacagaggtttcagggc

SEQ ID NO: 1047 - protein, 14 aa, Artificial Sequence
  source: /note="Description of Artificial Sequence: Synthetic heavy chain variable region CDR H3"
ARDPAVDAIPMLDY

SEQ ID NO: 1048 - DNA, 42 bp, Artificial Sequence
  source: /note="Description of Artificial Sequence: Synthetic heavy chain variable region CDR H3"
gcgagagatccagcagtcgatgcaataccgatgcttgactac

SEQ ID NO: 1049 - DNA, 336 bp, Artificial Sequence
  source: /note="Description of Artificial Sequence: Synthetic light chain variable region"
gacatccaggtgacccagtctccactctccctgcccgtcacccttggacagccggcctccatctcctgcaggtctagtcaaagcctcgtgtacactgatggaaacacctacttgagctggtttcagcagaggccaggccaatctccaaggcgcctaatttatagggtttctcaccgggactctggggtcccagacagattcaccggcagtgggtcaggcactgatttcacactgataatccgcagggtggaggctgaggatgttggggtttattactgcatgcaaggtacacactggcctctcactttcggcggagggaccaaggtggaaatcaaa

SEQ ID NO: 1050 - protein, 112 aa, Artificial Sequence
  source: /note="Description of Artificial Sequence: Synthetic light chain variable region"
DIQVTQSPLSLPVTLGQPASISCRSSQSLVYTDGNTYLSWFQQRPGQSPRRLIYRVSHRDSGVPDRFTGSGSGTDFTLIIRRVEAEDVGVYYCMQGTHWPLTFGGGTKVEIK

SEQ ID NO: 1051 - protein, 16 aa, Artificial Sequence
  source: /note="Description of Artificial Sequence: Synthetic light chain variable region CDR L1"
RSSQSLVYTDGNTYLS

SEQ ID NO: 1052 - DNA, 48 bp, Artificial Sequence
  source: /note="Description of Artificial Sequence: Synthetic light chain variable region CDR L1"
aggtctagtcaaagcctcgtgtacactgatggaaacacctacttgagc

SEQ ID NO: 1053 - protein, 7 aa, Artificial Sequence
  source: /note="Description of Artificial Sequence: Synthetic light chain variable region CDR L2"
RVSHRDS

SEQ ID NO: 1054 - DNA, 21 bp, Artificial Sequence
  source: /note="Description of Artificial Sequence: Synthetic light chain variable region CDR L2"
agggtttctcaccgggactct

SEQ ID NO: 1055 - protein, 9 aa, Artificial Sequence
  source: /note="Description of Artificial Sequence: Synthetic light chain variable region CDR L3"
MQGTHWPLT

SEQ ID NO: 1056 - DNA, 27 bp, Artificial Sequence
  source: /note="Description of Artificial Sequence: Synthetic light chain variable region CDR L3"
atgcaaggtacacactggcctctcact

SEQ ID NO: 1057 - DNA, 351 bp, Artificial Sequence
  source: /note="Description of Artificial Sequence: Synthetic heavy chain variable region"
caggtccagctggtgcagtctgggggaggcgtggtccagcctgggaggtccctgagactctcctgtgcagcctctggattcacgttcagtgactatgccatgcactgggtccgccaggctccaggcaaggggctggagtgggtggcaatcatatcatatgatgcaaataataaatattatgcagactccgtgaagggccgattcaccatctccagagacaattccaagaacacggtgtatctgcaaatgaacagcctgagacctgaggacacggctgtatattactgtgcgaaagaagagtggctggtgccagcctactggggccagggaatcctggtcaccgtctcctca

SEQ ID NO: 1058 - protein, 117 aa, Artificial Sequence
  source: /note="Description of Artificial Sequence: Synthetic heavy chain variable region"
QVQLVQSGGGVVQPGRSLRLSCAASGFTFSDYAMHWVRQAPGKGLEWVAIISYDANNKYYADSVKGRFTISRDNSKNTVYLQMNSLRPEDTAVYYCAKEEWLVPAYWGQGILVTVSS

SEQ ID NO: 1059 - protein, 9 aa, Artificial Sequence
  source: /note="Description of Artificial Sequence: Synthetic heavy chain variable region CDR H1"
FTFSDYAMH

SEQ ID NO: 1060 - DNA, 27 bp, Artificial Sequence
  source: /note="Description of Artificial Sequence: Synthetic heavy chain variable region CDR H1"
ttcacgttcagtgactatgccatgcac

SEQ ID NO: 1061 - protein, 17 aa, Artificial Sequence
  source: /note="Description of Artificial Sequence: Synthetic heavy chain variable region CDR H2"
IISYDANNKYYADSVKG

SEQ ID NO: 1062 - DNA, 51 bp, Artificial Sequence
  source: /note="Description of Artificial Sequence: Synthetic heavy chain variable region CDR H2"
atcatatcatatgatgcaaataataaatattatgcagactccgtgaagggc

SEQ ID NO: 1063 - protein, 10 aa, Artificial Sequence
  source: /note="Description of Artificial Sequence: Synthetic heavy chain variable region CDR H3"
AKEEWLVPAY

SEQ ID NO: 1064 - DNA, 30 bp, Artificial Sequence
  source: /note="Description of Artificial Sequence: Synthetic heavy chain variable region CDR H3"
gcgaaagaagagtggctggtgccagcctac

SEQ ID NO: 1065 - DNA, 327 bp, Artificial Sequence
  source: /note="Description of Artificial Sequence: Synthetic light chain variable region"
cagtctgtgctgactcagcctgcctccgtgtctgggtctcctggacagtcgatcaccatctcctgcactggaaccagcagtgacgttggtggatataattacgtctcctggtaccaacaacacccaggcaaagcccccaaactcttaatttatgaggtctctaatcggccctcaggggtttctaatcgcttctctggctccaagtctggcaacacggcctccctgaccatctctgggctccagcctgaggacgaggctgattattactgcagctcatattcaaccaatagtgccccctttggaactgggaccaagctcaccgtccta

SEQ ID NO: 1066 - protein, 109 aa, Artificial Sequence
  source: /note="Description of Artificial Sequence: Synthetic light chain variable region"
QSVLTQPASVSGSPGQSITISCTGTSSDVGGYNYVSWYQQHPGKAPKLLIYEVSNRPSGVSNRFSGSKSGNTASLTISGLQPEDEADYYCSSYSTNSAPFGTGTKLTVL

SEQ ID NO: 1067 - protein, 14 aa, Artificial Sequence
  source: /note="Description of Artificial Sequence: Synthetic light chain variable region CDR L1"
TGTSSDVGGYNYVS

SEQ ID NO: 1068 - DNA, 42 bp, Artificial Sequence
  source: /note="Description of Artificial Sequence: Synthetic light chain variable region CDR L1"
actggaaccagcagtgacgttggtggatataattacgtctcc

SEQ ID NO: 1069 - protein, 7 aa, Artificial Sequence
  source: /note="Description of Artificial Sequence: Synthetic light chain variable region CDR L2"
EVSNRPS

SEQ ID NO: 1070 - DNA, 21 bp, Artificial Sequence
  source: /note="Description of Artificial Sequence: Synthetic light chain variable region CDR L2"
gaggtctctaatcggccctca

SEQ ID NO: 1071 - protein, 9 aa, Artificial Sequence
  source: /note="Description of Artificial Sequence: Synthetic light chain variable region CDR L3"
SSYSTNSAP

SEQ ID NO: 1072 - DNA, 27 bp, Artificial Sequence
  source: /note="Description of Artificial Sequence: Synthetic light chain variable region CDR L3"
agctcatattcaaccaatagtgccccc

SEQ ID NO: 1073 - DNA, 366 bp, Artificial Sequence
  source: /note="Description of Artificial Sequence: Synthetic heavy chain variable region"
caggtccagcttgtgcagtctgggggaggcgtggtccagtctgggaggtccctgagactctcctgtgcagcgtctggattcaccttcagtgacaatggcatgcactgggtccgccaggctccaggcaaggggctggagtgggtggcaggaatctttcatgatgggagtaataaacaatatgcagaatccgtgaagggccgattcatcatctccagagacaattccaagaacactctctatctgcaaatgaacagcctgagagccgaggacacggctctatatttctgtgcgagagccccttacgatatttggagcggatattgtcttgactactggggccagggaaccctggtcaccgtctcctca

SEQ ID NO: 1074 - protein, 122 aa, Artificial Sequence
  source: /note="Description of Artificial Sequence: Synthetic heavy chain variable region"
QVQLVQSGGGVVQSGRSLRLSCAASGFTFSDNGMHWVRQAPGKGLEWVAGIFHDGSNKQYAESVKGRFIISRDNSKNTLYLQMNSLRAEDTALYFCARAPYDIWSGYCLDYWGQGTLVTVSS

SEQ ID NO: 1075 - protein, 9 aa, Artificial Sequence
  source: /note="Description of Artificial Sequence: Synthetic heavy chain variable region CDR H1"
FTFSDNGMH

SEQ ID NO: 1076 - DNA, 27 bp, Artificial Sequence
  source: /note="Description of Artificial Sequence: Synthetic heavy chain variable region CDR H1"
ttcaccttcagtgacaatggcatgcac

SEQ ID NO: 1077 - protein, 17 aa, Artificial Sequence
  source: /note="Description of Artificial Sequence: Synthetic heavy chain variable region CDR H2"
GIFHDGSNKQYAESVKG

SEQ ID NO: 1078 - DNA, 51 bp, Artificial Sequence
  source: /note="Description of Artificial Sequence: Synthetic heavy chain variable region CDR H2"
ggaatctttcatgatgggagtaataaacaatatgcagaatccgtgaagggc

SEQ ID NO: 1079 - protein, 15 aa, Artificial Sequence
  source: /note="Description of Artificial Sequence: Synthetic heavy chain variable region CDR H3"
ARAPYDIWSGYCLDY

SEQ ID NO: 1080 - DNA, 45 bp, Artificial Sequence
  source: /note="Description of Artificial Sequence: Synthetic heavy chain variable region CDR H3"
gcgagagccccttacgatatttggagcggatattgtcttgactac

SEQ ID NO: 1081 - DNA, 321 bp, Artificial Sequence
  source: /note="Description of Artificial Sequence: Synthetic light chain variable region"
gacatccggatgacccagtctccagccaccctgtctctgtctccaggggaaagcgccaccctctcctgcagggccagtcagagtgttatcaacaacttagcctggtaccagcagagacctggccaggctcccaggctcctcatctatggtgcatctaccagggccactggtatcccagccaggttcagtggcagtgggtctgagacagagttcactctcactatcagcagcctgcagtctgaagatttcgcggtttatcactgtcagcagtatagtatctggcctcagacttttggccaggggaccaagctggagatcaaa

SEQ ID NO: 1082 - protein, 107 aa, Artificial Sequence
  source: /note="Description of Artificial Sequence: Synthetic light chain variable region"
DIRMTQSPATLSLSPGESATLSCRASQSVINNLAWYQQRPGQAPRLLIYGASTRATGIPARFSGSGSETEFTLTISSLQSEDFAVYHCQQYSIWPQTFGQGTKLEIK

SEQ ID NO: 1083 - protein, 11 aa, Artificial Sequence
  source: /note="Description of Artificial Sequence: Synthetic light chain variable region CDR L1"
RASQSVINNLA

SEQ ID NO: 1084 - DNA, 33 bp, Artificial Sequence
  source: /note="Description of Artificial Sequence: Synthetic light chain variable region CDR L1"
agggccagtcagagtgttatcaacaacttagcc

SEQ ID NO: 1085 - protein, 7 aa, Artificial Sequence
  source: /note="Description of Artificial Sequence: Synthetic light chain variable region CDR L2"
GASTRAT

SEQ ID NO: 1086 - DNA, 21 bp, Artificial Sequence
  source: /note="Description of Artificial Sequence: Synthetic light chain variable region CDR L2"
ggtgcatctaccagggccact

SEQ ID NO: 1087 - protein, 9 aa, Artificial Sequence
  source: /note="Description of Artificial Sequence: Synthetic light chain variable region CDR L3"
QQYSIWPQT

SEQ ID NO: 1088 - DNA, 27 bp, Artificial Sequence
  source: /note="Description of Artificial Sequence: Synthetic light chain variable region CDR L3"
cagcagtatagtatctggcctcagact

SEQ ID NO: 1089 - DNA, 366 bp, Artificial Sequence
  source: /note="Description of Artificial Sequence: Synthetic heavy chain variable region"
gaggtgcagctgttggagtccgggggaggcgtggtccagtctgggaggtccctgagactctcctgtgtagcgtctggattcaccttcagtgacagtggcatgcactgggtccgccaggctccaggcaaggggctggagtgggtggcaggtttattttatgatggaagtaataaacaatatgcagactccgtgaagggccgattcaccatctccagagacaattccaagagcacactgtatctgcagatgaacagcctgagggccgaggacacggctgtttattactgtgcgagagccccttacgatatttggagtggttattgtcttgactactggggccagggaaccctggtcactgtctcctca

SEQ ID NO: 1090 - protein, 122 aa, Artificial Sequence
  source: /note="Description of Artificial Sequence: Synthetic heavy chain variable region"
EVQLLESGGGVVQSGRSLRLSCVASGFTFSDSGMHWVRQAPGKGLEWVAGLFYDGSNKQYADSVKGRFTISRDNSKSTLYLQMNSLRAEDTAVYYCARAPYDIWSGYCLDYWGQGTLVTVSS

SEQ ID NO: 1091 - protein, 9 aa, Artificial Sequence
  source: /note="Description of Artificial Sequence: Synthetic heavy chain variable region CDR H1"
FTFSDSGMH

SEQ ID NO: 1092 - DNA, 27 bp, Artificial Sequence
  source: /note="Description of Artificial Sequence: Synthetic heavy chain variable region CDR H1"
ttcaccttcagtgacagtggcatgcac

SEQ ID NO: 1093 - protein, 17 aa, Artificial Sequence
  source: /note="Description of Artificial Sequence: Synthetic heavy chain variable region CDR H2"
GLFYDGSNKQYADSVKG

SEQ ID NO: 1094 - DNA, 51 bp, Artificial Sequence
  source: /note="Description of Artificial Sequence: Synthetic heavy chain variable region CDR H2"
ggtttattttatgatggaagtaataaacaatatgcagactccgtgaagggc

SEQ ID NO: 1095 - protein, 15 aa, Artificial Sequence
  source: /note="Description of Artificial Sequence: Synthetic heavy chain variable region CDR H3"
ARAPYDIWSGYCLDY

SEQ ID NO: 1096 - DNA, 45 bp, Artificial Sequence; identical to SEQ ID NO: 312
  source: /note="Description of Artificial Sequence: Synthetic heavy chain variable region CDR H3"

SEQ ID NO: 1097 - DNA, 321 bp, Artificial Sequence
  source: /note="Description of Artificial Sequence: Synthetic light chain variable region"
gaaattgtattgacacagtctccagccaccctgtatatgtctccaggggaaagagccaccctctcctgcagggccagtcagagtgttaacaacaacttagcctggtaccagcagagacctggccaggctcccaggctcctcatctatggtgcatctaccagggccactggtatcccagccaggttcagtggcagtgggtctgagacagagttcactctcactatcagcagcctgcagtctgaagattttgcggtttatcactgtcagcagtatagtatctggcctcagacttttggccaggggaccaagctggagatcaaa

SEQ ID NO: 1098 - protein, 107 aa, Artificial Sequence
  source: /note="Description of Artificial Sequence: Synthetic light chain variable region"
EIVLTQSPATLYMSPGERATLSCRASQSVNNNLAWYQQRPGQAPRLLIYGASTRATGIPARFSGSGSETEFTLTISSLQSEDFAVYHCQQYSIWPQTFGQGTKLEIK

SEQ ID NO: 1099 - protein, 11 aa, Artificial Sequence
  source: /note="Description of Artificial Sequence: Synthetic light chain variable region CDR L1"
RASQSVNNNLA

SEQ ID NO: 1100 - DNA, 33 bp, Artificial Sequence; identical to SEQ ID NO: 316
  source: /note="Description of Artificial Sequence: Synthetic light chain variable region CDR L1"

SEQ ID NO: 1101 - protein, 7 aa, Artificial Sequence
  source: /note="Description of Artificial Sequence: Synthetic light chain variable region CDR L2"
GASTRAT

SEQ ID NO: 1102 - DNA, 21 bp, Artificial Sequence
  source: /note="Description of Artificial Sequence: Synthetic light chain variable region CDR L2"
ggtgcatctaccagggccact

SEQ ID NO: 1103 - protein, 9 aa, Artificial Sequence
  source: /note="Description of Artificial Sequence: Synthetic light chain variable region CDR L3"
QQYSIWPQT

SEQ ID NO: 1104 - DNA, 27 bp, Artificial Sequence
  source: /note="Description of Artificial Sequence: Synthetic light chain variable region CDR L3"
cagcagtatagtatctggcctcagact

SEQ ID NO: 1105 - DNA, 363 bp, Artificial Sequence
  source: /note="Description of Artificial Sequence: Synthetic heavy chain variable region"
caggtccagctggtgcagtctggagctgaggtgaagaagcctggggcctcagtgaaggtctcgtgcaagacttctggttacaccttttccaactacggtatcagctggctgcgacaggcccctggacaagggcttgagtggatggcatggatcagcccttataatgggaacacaaagtctgcacagaggtttcagggcagagtcatcatgaccacagacacatccacgaggacagcccacatggaggtgaagagcctgagaactgacgacacggccacatattactgtgcgagagatccagcagtcgatgcaataccgatgcttgactactggggccagggaaccatggtcaccgtctcctca

SEQ ID NO: 1106 - protein, 121 aa, Artificial Sequence
  source: /note="Description of Artificial Sequence: Synthetic heavy chain variable region"
QVQLVQSGAEVKKPGASVKVSCKTSGYTFSNYGISWLRQAPGQGLEWMAWISPYNGNTKSAQRFQGRVIMTTDTSTRTAHMEVKSLRTDDTATYYCARDPAVDAIPMLDYWGQGTMVTVSS

SEQ ID NO: 1107 - protein, 9 aa, Artificial Sequence
  source: /note="Description of Artificial Sequence: Synthetic heavy chain variable region CDR H1"
YTFSNYGIS

SEQ ID NO: 1108 - DNA, 27 bp, Artificial Sequence
  source: /note="Description of Artificial Sequence: Synthetic heavy chain variable region CDR H1"
tacaccttttccaactacggtatcagc

SEQ ID NO: 1109 - protein, 17 aa, Artificial Sequence
  source: /note="Description of Artificial Sequence: Synthetic heavy chain variable region CDR H2"
WISPYNGNTKSAQRFQG

SEQ ID NO: 1110 - DNA, 51 bp, Artificial Sequence; identical to SEQ ID NO: 1046
  source: /note="Description of Artificial Sequence: Synthetic heavy chain variable region CDR H2"

SEQ ID NO: 1111 - protein, 14 aa, Artificial Sequence
  source: /note="Description of Artificial Sequence: Synthetic heavy chain variable region CDR H3"
ARDPAVDAIPMLDY

SEQ ID NO: 1112 - DNA, 42 bp, Artificial Sequence; identical to SEQ ID NO: 1048
  source: /note="Description of Artificial Sequence: Synthetic heavy chain variable region CDR H3"

SEQ ID NO: 1113 - DNA, 336 bp, Artificial Sequence
  source: /note="Description of Artificial Sequence: Synthetic light chain variable region"
gaaattgtgttgacacagtctccactctccctgcccgtcacccttggacagccggcctccatctcctgcaggtctagtcaaagcctcgtgtacactgatggaaacacctacttgagctggtttcagcagaggccaggccaatctccaaggcgcctaatttatagggtttctcaccgggactctggggtcccagacagattcaccggcagtgggtcaggcactgatttcacactgataatccgcagggtggaggctgaggatgttggggtttattactgcatgcaaggtacacactggcctctcactttcggcggagggaccaaggtggaaatcaaa

SEQ ID NO: 1114 - protein, 112 aa, Artificial Sequence
  source: /note="Description of Artificial Sequence: Synthetic light chain variable region"
EIVLTQSPLSLPVTLGQPASISCRSSQSLVYTDGNTYLSWFQQRPGQSPRRLIYRVSHRDSGVPDRFTGSGSGTDFTLIIRRVEAEDVGVYYCMQGTHWPLTFGGGTKVEIK

SEQ ID NO: 1115 - protein, 16 aa, Artificial Sequence
  source: /note="Description of Artificial Sequence: Synthetic light chain variable region CDR L1"
RSSQSLVYTDGNTYLS

SEQ ID NO: 1116 - DNA, 48 bp, Artificial Sequence; identical to SEQ ID NO: 1052
  source: /note="Description of Artificial Sequence: Synthetic light chain variable region CDR L1"

SEQ ID NO: 1117 - protein, 7 aa, Artificial Sequence
  source: /note="Description of Artificial Sequence: Synthetic light chain variable region CDR L2"
RVSHRDS

SEQ ID NO: 1118 - DNA, 21 bp, Artificial Sequence
  source: /note="Description of Artificial Sequence: Synthetic light chain variable region CDR L2"
agggtttctcaccgggactct

SEQ ID NO: 1119 - protein, 9 aa, Artificial Sequence
  source: /note="Description of Artificial Sequence: Synthetic light chain variable region CDR L3"
MQGTHWPLT

SEQ ID NO: 1120 - DNA, 27 bp, Artificial Sequence
  source: /note="Description of Artificial Sequence: Synthetic light chain variable region CDR L3"
atgcaaggtacacactggcctctcact

SEQ ID NO: 1121 - DNA, 348 bp, Artificial Sequence
  source: /note="Description of Artificial Sequence: Synthetic heavy chain variable region"
gaggtgcagctggtggagtcgggcccaagactggtgaggccttcggagaccctgtccctcacctgcactgtctctggaggcttcatcaaaactagtagttactactggggctggatccgtcagcccccagggaaggggctagagtggattgggagtatctattatgctgggaccacctactacaacccgtccctccagagtcgagtcaccatgtccgttgacacgtcgaacaaccagttctccctgaagctgaactctgtgaccgccgcagacacggctgtatattactgtgcgaccgcctggacttttgaccactggggccagggaaccctggtcactgtctcctca

SEQ ID NO: 1122 - protein, 116 aa, Artificial Sequence
  source: /note="Description of Artificial Sequence: Synthetic heavy chain variable region"
EVQLVESGPRLVRPSETLSLTCTVSGGFIKTSSYYWGWIRQPPGKGLEWIGSIYYAGTTYYNPSLQSRVTMSVDTSNNQFSLKLNSVTAADTAVYYCATAWTFDHWGQGTLVTVSS

SEQ ID NO: 1123 - protein, 11 aa, Artificial Sequence
  source: /note="Description of Artificial Sequence: Synthetic heavy chain variable region CDR H1"
GFIKTSSYYWG

SEQ ID NO: 1124 - DNA, 33 bp, Artificial Sequence
  source: /note="Description of Artificial Sequence: Synthetic heavy chain variable region CDR H1"
ggcttcatcaaaactagtagttactactggggc

SEQ ID NO: 1125 - protein, 16 aa, Artificial Sequence
  source: /note="Description of Artificial Sequence: Synthetic heavy chain variable region CDR H2"
SIYYAGTTYYNPSLQS

SEQ ID NO: 1126 - DNA, 48 bp, Artificial Sequence
  source: /note="Description of Artificial Sequence: Synthetic heavy chain variable region CDR H2"
agtatctattatgctgggaccacctactacaacccgtccctccagagt

SEQ ID NO: 1127 - protein, 8 aa, Artificial Sequence
  source: /note="Description of Artificial Sequence: Synthetic heavy chain variable region CDR H3"
ATAWTFDH

SEQ ID NO: 1128 - DNA, 24 bp, Artificial Sequence
  source: /note="Description of Artificial Sequence: Synthetic heavy chain variable region CDR H3"
gcgaccgcctggacttttgaccac

SEQ ID NO: 1129 - DNA, 327 bp, Artificial Sequence
  source: /note="Description of Artificial Sequence: Synthetic light chain variable region"
gaaattgtattgacacagtctccagccaccctgtccttgtctccaggggaaagagccaccctctcctgcagggccagtcagagtcttagcaactacttagcctggtaccaacagaaacctggccaggctcccaggctcctcatctatgatgcatccaacagggccactggcatcccagccaggttcagtggcagtgggtctgggacagacttcactctcaccatcagcagcctagagcctgaagattttgcagtttattactgtcagctgcgtggccactggccccccacgatcaccttcggccaagggacacgactggagattaaa

SEQ ID NO: 1130 - protein, 109 aa, Artificial Sequence
  source: /note="Description of Artificial Sequence: Synthetic light chain variable region"
EIVLTQSPATLSLSPGERATLSCRASQSLSNYLAWYQQKPGQAPRLLIYDASNRATGIPARFSGSGSGTDFTLTISSLEPEDFAVYYCQLRGHWPPTITFGQGTRLEIK

SEQ ID NO: 1131 - protein, 11 aa, Artificial Sequence
  source: /note="Description of Artificial Sequence: Synthetic light chain variable region CDR L1"
RASQSLSNYLA

SEQ ID NO: 1132 - DNA, 33 bp, Artificial Sequence
  source: /note="Description of Artificial Sequence: Synthetic light chain variable region CDR L1"
agggccagtcagagtcttagcaactacttagcc

SEQ ID NO: 1133 - protein, 7 aa, Artificial Sequence
  source: /note="Description of Artificial Sequence: Synthetic light chain variable region CDR L2"
DASNRAT

SEQ ID NO: 1134 - DNA, 21 bp, Artificial Sequence
  source: /note="Description of Artificial Sequence: Synthetic light chain variable region CDR L2"
gatgcatccaacagggccact

SEQ ID NO: 1135 - protein, 11 aa, Artificial Sequence
  source: /note="Description of Artificial Sequence: Synthetic light chain variable region CDR L3"
QLRGHWPPTIT

SEQ ID NO: 1136 - DNA, 33 bp, Artificial Sequence
  source: /note="Description of Artificial Sequence: Synthetic light chain variable region CDR L3"
cagctgcgtggccactggccccccacgatcacc

SEQ ID NO: 1137 - DNA, 369 bp, Artificial Sequence
  source: /note="Description of Artificial Sequence: Synthetic heavy chain variable region"
caggtccagcttgtacagtctgggggaggcttggttcagccgggggggtccctgagactctcctgtgcagcctctggattcgcctttagcgactataccatgagctgggtccgccaggctccagggaaggggctggagtgggtctcaagtgttagtggcacgggtggtacctcatactacgcagactccgtgaatggccggttcgccatctccagagagaattccaagaacacgctgtttctgcaaatggacagcctgagagccgaggacacggccacttactactgtgccaaagatgggttgagggacgtatcgagggtttattacatcgacgtctggggcaaagggaccacggtcaccgtctcctca

SEQ ID NO: 1138 - protein, 123 aa, Artificial Sequence
  source: /note="Description of Artificial Sequence: Synthetic heavy chain variable region"
QVQLVQSGGGLVQPGGSLRLSCAASGFAFSDYTMSWVRQAPGKGLEWVSSVSGTGGTSYYADSVNGRFAISRENSKNTLFLQMDSLRAEDTATYYCAKDGLRDVSRVYYIDVWGKGTTVTVSS

SEQ ID NO: 1139 - protein, 9 aa, Artificial Sequence
  source: /note="Description of Artificial Sequence: Synthetic heavy chain variable region CDR H1"
FAFSDYTMS

SEQ ID NO: 1140 - DNA, 27 bp, Artificial Sequence
  source: /note="Description of Artificial Sequence: Synthetic heavy chain variable region CDR H1"
ttcgcctttagcgactataccatgagc

SEQ ID NO: 1141 - protein, 17 aa, Artificial Sequence
  source: /note="Description of Artificial Sequence: Synthetic heavy chain variable region CDR H2"
SVSGTGGTSYYADSVNG

SEQ ID NO: 1142 - DNA, 51 bp, Artificial Sequence
  source: /note="Description of Artificial Sequence: Synthetic heavy chain variable region CDR H2"
agtgttagtggcacgggtggtacctcatactacgcagactccgtgaatggc

SEQ ID NO: 1143 - protein, 16 aa, Artificial Sequence
  source: /note="Description of Artificial Sequence: Synthetic heavy chain variable region CDR H3"
AKDGLRDVSRVYYIDV

SEQ ID NO: 1144 - DNA, 48 bp, Artificial Sequence
  source: /note="Description of Artificial Sequence: Synthetic heavy chain variable region CDR H3"
gccaaagatgggttgagggacgtatcgagggtttattacatcgacgtc

SEQ ID NO: 1145 - DNA, 333 bp, Artificial Sequence
  source: /note="Description of Artificial Sequence: Synthetic light chain variable region"
cagcctgtgctgactcagcctgcctccgtgtctgggtctcctggacagtcgatcaccatctcctgcactggaaccagccgtgacattggttctcatgactctgtctcctggtaccaacaaaagccaggcaaagcccccaaactcatcatttatgcagtcagaaatcggccctcagggctttctaatcgcttctctggttccaagtctggcaacacggcctccctgaccatctctgggctccagactgaagacgaaggtgactattactgcagctcatatagaaacggcaacgctctgggggtcttcggaactgggaccaaggtcaccgtcctc

SEQ ID NO: 1146 - protein, 111 aa, Artificial Sequence
  source: /note="Description of Artificial Sequence: Synthetic light chain variable region"
QPVLTQPASVSGSPGQSITISCTGTSRDIGSHDSVSWYQQKPGKAPKLIIYAVRNRPSGLSNRFSGSKSGNTASLTISGLQTEDEGDYYCSSYRNGNALGVFGTGTKVTVL

SEQ ID NO: 1147 - protein, 14 aa, Artificial Sequence
  source: /note="Description of Artificial Sequence: Synthetic light chain variable region CDR L1"
TGTSRDIGSHDSVS

SEQ ID NO: 1148 - DNA, 42 bp, Artificial Sequence
  source: /note="Description of Artificial Sequence: Synthetic light chain variable region CDR L1"
actggaaccagccgtgacattggttctcatgactctgtctcc

SEQ ID NO: 1149 - protein, 7 aa, Artificial Sequence
  source: /note="Description of Artificial Sequence: Synthetic light chain variable region CDR L2"
AVRNRPS

SEQ ID NO: 1150 - DNA, 21 bp, Artificial Sequence
  source: /note="Description of Artificial Sequence: Synthetic light chain variable region CDR L2"
gcagtcagaaatcggccctca

SEQ ID NO: 1151 - protein, 11 aa, Artificial Sequence
  source: /note="Description of Artificial Sequence: Synthetic light chain variable region CDR L3"
SSYRNGNALGV

SEQ ID NO: 1152 - DNA, 33 bp, Artificial Sequence
  source: /note="Description of Artificial Sequence: Synthetic light chain variable region CDR L3"
agctcatatagaaacggcaacgctctgggggtc

SEQ ID NO: 1153 - DNA, 369 bp, Artificial Sequence
  source: /note="Description of Artificial Sequence: Synthetic heavy chain variable region"
caggtgcagctggtggagtctgggggaggcttggttcagccgggggggtccctgagactctcctgtgcagcctctggattcgcctttagcaactatgccatgagctgggtccgccaggctccagggaagggcctggagtgggtctcaagtgttagtggcacgggtggtaccacatactacgcagactccgtgaacgggcggttcgccatctccagagagaattccaggaacaccctctatctgcaaatggatagcctgagagtcgaggacacggccacttattactgtgccaaagatgggttgagggacttatcgagggtctattacatcgacgtctggggcaaaggggccacggtcaccgtctcttca

SEQ ID NO: 1154 - protein, 123 aa, Artificial Sequence
  source: /note="Description of Artificial Sequence: Synthetic heavy chain variable region"
QVQLVESGGGLVQPGGSLRLSCAASGFAFSNYAMSWVRQAPGKGLEWVSSVSGTGGTTYYADSVNGRFAISRENSRNTLYLQMDSLRVEDTATYYCAKDGLRDLSRVYYIDVWGKGATVTVSS

SEQ ID NO: 1155 - protein, 9 aa, Artificial Sequence
  source: /note="Description of Artificial Sequence: Synthetic heavy chain variable region CDR H1"
FAFSNYAMS

SEQ ID NO: 1156 - DNA, 27 bp, Artificial Sequence
  source: /note="Description of Artificial Sequence: Synthetic heavy chain variable region CDR H1"
ttcgcctttagcaactatgccatgagc

SEQ ID NO: 1157 - protein, 17 aa, Artificial Sequence
  source: /note="Description of Artificial Sequence: Synthetic heavy chain variable region CDR H2"
SVSGTGGTTYYADSVNG

SEQ ID NO: 1158 - DNA, 51 bp, Artificial Sequence
  source: /note="Description of Artificial Sequence: Synthetic heavy chain variable region CDR H2"
agtgttagtggcacgggtggtaccacatactacgcagactccgtgaacggg

SEQ ID NO: 1159 - protein, 16 aa, Artificial Sequence
  source: /note="Description of Artificial Sequence: Synthetic heavy chain variable region CDR H3"
AKDGLRDLSRVYYIDV

SEQ ID NO: 1160 - DNA, 48 bp, Artificial Sequence
  source: /note="Description of Artificial Sequence: Synthetic heavy chain variable region CDR H3"
gccaaagatgggttgagggacttatcgagggtctattacatcgacgtc

SEQ ID NO: 1161 - DNA, 333 bp, Artificial Sequence
  source: /note="Description of Artificial Sequence: Synthetic light chain variable region"
cagtctgtcctgactcagcctgcctccgtgtctgggtctcctggacagtcgatcaccatctcctgcactggaaccagccgtgacattggtagtcatgactatgtctcctggtaccaacaacacccaggcaaagcccccaaactcatcatttatggggtcaataatcggccctcaggactttctaatcgcttctctggttccaagtctggcaacacggcctccctgaccatctctgggctccagactgaagacgaaggtgactattactgcagctcatatagaaacggcaacactctgggggtcttcggaactgggaccaagctcaccgtccta

SEQ ID NO: 1162 - protein, 111 aa, Artificial Sequence
  source: /note="Description of Artificial Sequence: Synthetic light chain variable region"
QSVLTQPASVSGSPGQSITISCTGTSRDIGSHDYVSWYQQHPGKAPKLIIYGVNNRPSGLSNRFSGSKSGNTASLTISGLQTEDEGDYYCSSYRNGNTLGVFGTGTKLTVL

SEQ ID NO: 1163 - protein, 14 aa, Artificial Sequence
  source: /note="Description of Artificial Sequence: Synthetic light chain variable region CDR L1"
TGTSRDIGSHDYVS

SEQ ID NO: 1164 - DNA, 42 bp, Artificial Sequence
  source: /note="Description of Artificial Sequence: Synthetic light chain variable region CDR L1"
actggaaccagccgtgacattggtagtcatgactatgtctcc

SEQ ID NO: 1165 - protein, 7 aa, Artificial Sequence
  source: /note="Description of Artificial Sequence: Synthetic light chain variable region CDR L2"
GVNNRPS

SEQ ID NO: 1166 - DNA, 21 bp, Artificial Sequence
  source: /note="Description of Artificial Sequence: Synthetic light chain variable region CDR L2"
ggggtcaataatcggccctca

SEQ ID NO: 1167 - protein, 11 aa, Artificial Sequence
  source: /note="Description of Artificial Sequence: Synthetic light chain variable region CDR L3"
SSYRNGNTLGV

SEQ ID NO: 1168 - DNA, 33 bp, Artificial Sequence
  source: /note="Description of Artificial Sequence: Synthetic light chain variable region CDR L3"
agctcatatagaaacggcaacactctgggggtc

SEQ ID NO: 1169 - DNA, 375 bp, Artificial Sequence
  source: /note="Description of Artificial Sequence: Synthetic heavy chain variable region"
caggtccagctggtacagtctggggctgaggtgaagaagcctgggtcctcggtgaaggtctcctgcaaggcctctggaggcaccttcagcggctacgctatcaactgggtgcgacaggcccctggacaagggctcgagtggatgggagggatcatccatatatttgggacagtaaactacgctccgaagttccagggcagactcacgataaccgcggacgcatccacgggcacagcctacatggaattgagcagcctgatgtctgaggacacggccctatattattgtgcgagagatgcttacgaagtgtggaccggttcttatctccccccttttgactactggggccagggaaccctggtcaccgtctcctca

SEQ ID NO: 1170 - protein, 125 aa, Artificial Sequence
  source: /note="Description of Artificial Sequence: Synthetic heavy chain variable region"
QVQLVQSGAEVKKPGSSVKVSCKASGGTFSGYAINWVRQAPGQGLEWMGGIIHIFGTVNYAPKFQGRLTITADASTGTAYMELSSLMSEDTALYYCARDAYEVWTGSYLPPFDYWGQGTLVTVSS

SEQ ID NO: 1171 - protein, 9 aa, Artificial Sequence
  source: /note="Description of Artificial Sequence: Synthetic heavy chain variable region CDR H1"
GTFSGYAIN

SEQ ID NO: 1172 - DNA, 27 bp, Artificial Sequence
  source: /note="Description of Artificial Sequence: Synthetic heavy chain variable region CDR H1"
ggcaccttcagcggctacgctatcaac

SEQ ID NO: 1173 - protein, 17 aa, Artificial Sequence
  source: /note="Description of Artificial Sequence: Synthetic heavy chain variable region CDR H2"
GIIHIFGTVNYAPKFQG

SEQ ID NO: 1174 - DNA, 51 bp, Artificial Sequence
  source: /note="Description of Artificial Sequence: Synthetic heavy chain variable region CDR H2"
gggatcatccatatatttgggacagtaaactacgctccgaagttccagggc

SEQ ID NO: 1175 - protein, 18 aa, Artificial Sequence
  source: /note="Description of Artificial Sequence: Synthetic heavy chain variable region CDR H3"
ARDAYEVWTGSYLPPFDY

SEQ ID NO: 1176 - DNA, 54 bp, Artificial Sequence
  source: /note="Description of Artificial Sequence: Synthetic heavy chain variable region CDR H3"
gcgagagatgcttacgaagtgtggaccggttcttatctccccccttttgactac

SEQ ID NO: 1177 - DNA, 324 bp, Artificial Sequence
  source: /note="Description of Artificial Sequence: Synthetic light chain variable region"
gaaacgacactcacgcagtctccaggcaccctgtctttgtctcccggggaaagagtcaccctctcctgcagggccagtcagactgttacaagcaactacttagcctggtaccagcagaaacctggccaggctcccaggctcctcatctatgatgcattcaccagggccactggcgtcccagccaggttcagtggcagtgggtctgggacagacttcactctcaccatcagcagactggagcctgaagattttgcagtttactattgtcagcagtatggtagctcattcctcactttcggcggagggaccaaggtggaaatcaaa

SEQ ID NO: 1178 - protein, 108 aa, Artificial Sequence
  source: /note="Description of Artificial Sequence: Synthetic light chain variable region"
ETTLTQSPGTLSLSPGERVTLSCRASQTVTSNYLAWYQQKPGQAPRLLIYDAFTRATGVPARFSGSGSGTDFTLTISRLEPEDFAVYYCQQYGSSFLTFGGGTKVEIK

SEQ ID NO: 1179 - protein, 12 aa, Artificial Sequence
  source: /note="Description of Artificial Sequence: Synthetic light chain variable region CDR L1"
RASQTVTSNYLA

SEQ ID NO: 1180 - DNA, 36 bp, Artificial Sequence; identical to SEQ ID NO: 220
  source: /note="Description of Artificial Sequence: Synthetic light chain variable region CDR L1"

SEQ ID NO: 1181 - protein, 7 aa, Artificial Sequence
  source: /note="Description of Artificial Sequence: Synthetic light chain variable region CDR L2"
DAFTRAT

SEQ ID NO: 1182 - DNA, 21 bp, Artificial Sequence
  source: /note="Description of Artificial Sequence: Synthetic light chain variable region CDR L2"
gatgcattcaccagggccact

SEQ ID NO: 1183 - protein, 9 aa, Artificial Sequence
  source: /note="Description of Artificial Sequence: Synthetic light chain variable region CDR L3"
QQYGSSFLT

SEQ ID NO: 1184 - DNA, 27 bp, Artificial Sequence
  source: /note="Description of Artificial Sequence: Synthetic light chain variable region CDR L3"
cagcagtatggtagctcattcctcact

SEQ ID NO: 1185 - DNA, 366 bp, Artificial Sequence
  source: /note="Description of Artificial Sequence: Synthetic heavy chain variable region"
gaggtgcagctggtggagtctgggggaggcgtggtccagtctgggaggtccctgagactctcctgtgcagcatctggattcatcttcagtgacaatggcatgcactgggtccgccaggctccaggcaaggggctggagtgggtggcaggtattttttatgatggaagtaataaacaatatgcagactccgtgaagggccgattcaccatctccagagacaattccaagaacacactgtatctgcaaatgaagagcctgagagccgaggacacggctgtgtattactgtgcgagagccccttacgatatctggagtggttattgtcttgactactggggccagggaaccctggtcaccgtctcctca

SEQ ID NO: 1186 - protein, 122 aa, Artificial Sequence
  source: /note="Description of Artificial Sequence: Synthetic heavy chain variable region"
EVQLVESGGGVVQSGRSLRLSCAASGFIFSDNGMHWVRQAPGKGLEWVAGIFYDGSNKQYADSVKGRFTISRDNSKNTLYLQMKSLRAEDTAVYYCARAPYDIWSGYCLDYWGQGTLVTVSS

SEQ ID NO: 1187 - protein, 9 aa, Artificial Sequence
  source: /note="Description of Artificial Sequence: Synthetic heavy chain variable region CDR H1"
FIFSDNGMH

SEQ ID NO: 1188 - DNA, 27 bp, Artificial Sequence
  source: /note="Description of Artificial Sequence: Synthetic heavy chain variable region CDR H1"
ttcatcttcagtgacaatggcatgcac

SEQ ID NO: 1189 - protein, 17 aa, Artificial Sequence
  source: /note="Description of Artificial Sequence: Synthetic heavy chain variable region CDR H2"
GIFYDGSNKQYADSVKG

SEQ ID NO: 1190 - DNA, 51 bp, Artificial Sequence
  source: /note="Description of Artificial Sequence: Synthetic heavy chain variable region CDR H2"
ggtattttttatgatggaagtaataaacaatatgcagactccgtgaagggc

SEQ ID NO: 1191 - protein, 15 aa, Artificial Sequence
  source: /note="Description of Artificial Sequence: Synthetic heavy chain variable region CDR H3"
ARAPYDIWSGYCLDY

SEQ ID NO: 1192 - DNA, 45 bp, Artificial Sequence
  source: /note="Description of Artificial Sequence: Synthetic heavy chain variable region CDR H3"
gcgagagccccttacgatatctggagtggttattgtcttgactac

SEQ ID NO: 1193 - DNA, 321 bp, Artificial Sequence
  source: /note="Description of Artificial Sequence: Synthetic light chain variable region"
gacatccaggtgacccagtctccagccaccctgtctatgtctccaggggaaagagccaccctctcctgcagggccagtcagagtgttaacaacaacttagcctggtaccagcagagacctggccaggctcccaggctcctcatctatggtgcatctacgagggccactggtatcccagccaggttcagtggcagtgggtctgagacagagttcactctcactatcagcagcctgcagtctgaagattttgcggtttatcactgtcagcagtatagtatctggcctcagacttttggccaggggaccaaggtggaaatcaaa

SEQ ID NO: 1194 - protein, 107 aa, Artificial Sequence
  source: /note="Description of Artificial Sequence: Synthetic light chain variable region"
DIQVTQSPATLSMSPGERATLSCRASQSVNNNLAWYQQRPGQAPRLLIYGASTRATGIPARFSGSGSETEFTLTISSLQSEDFAVYHCQQYSIWPQTFGQGTKVEIK

SEQ ID NO: 1195 - protein, 11 aa, Artificial Sequence
  source: /note="Description of Artificial Sequence: Synthetic light chain variable region CDR L1"
RASQSVNNNLA

SEQ ID NO: 1196 - DNA, 33 bp, Artificial Sequence; identical to SEQ ID NO: 316
  source: /note="Description of Artificial Sequence: Synthetic light chain variable region CDR L1"

SEQ ID NO: 1197 - protein, 7 aa, Artificial Sequence
  source: /note="Description of Artificial Sequence: Synthetic light chain variable region CDR L2"
GASTRAT

SEQ ID NO: 1198 - DNA, 21 bp, Artificial Sequence
  source: /note="Description of Artificial Sequence: Synthetic light chain variable region CDR L2"
ggtgcatctacgagggccact

SEQ ID NO: 1199 - protein, 9 aa, Artificial Sequence
  source: /note="Description of Artificial Sequence: Synthetic light chain variable region CDR L3"
QQYSIWPQT

SEQ ID NO: 1200 - DNA, 27 bp, Artificial Sequence
  source: /note="Description of Artificial Sequence: Synthetic light chain variable region CDR L3"
cagcagtatagtatctggcctcagact

SEQ ID NO: 1201 - DNA, 360 bp, Artificial Sequence
  source: /note="Description of Artificial Sequence: Synthetic heavy chain variable region"
caggtccagcttgtacagtctggggctgaactaaagaagcctggctcctcggtgaaagtctcctgcaaggcttctgcagacaccttcaaaagttatgctatcaactgggtgcggcaggcccctggacaaggacttgagtggatgggagagttcatcccaatctttggtgtctcaccctccgcacagaagttccagggcagagtcaccattaccgcggacagatccacgtccacagcctacatggagttgagcagcctgaaatctgatgactcggccatttattactgtgcgacacgtctgtatacgttggggtccccttttgacaattggggccaggggaccacggtcaccgtctcctca

SEQ ID NO: 1202 - protein, 120 aa, Artificial Sequence
  source: /note="Description of Artificial Sequence: Synthetic heavy chain variable region"
QVQLVQSGAELKKPGSSVKVSCKASADTFKSYAINWVRQAPGQGLEWMGEFIPIFGVSPSAQKFQGRVTITADRSTSTAYMELSSLKSDDSAIYYCATRLYTLGSPFDNWGQGTTVTVSS

SEQ ID NO: 1203 - protein, 9 aa, Artificial Sequence
  source: /note="Description of Artificial Sequence: Synthetic heavy chain variable region CDR H1"
DTFKSYAIN

SEQ ID NO: 1204 - DNA, 27 bp, Artificial Sequence
  source: /note="Description of Artificial Sequence: Synthetic heavy chain variable region CDR H1"
gacaccttcaaaagttatgctatcaac

SEQ ID NO: 1205 - protein, 17 aa, Artificial Sequence
  source: /note="Description of Artificial Sequence: Synthetic heavy chain variable region CDR H2"
EFIPIFGVSPSAQKFQG

SEQ ID NO: 1206 - DNA, 51 bp, Artificial Sequence
  source: /note="Description of Artificial Sequence: Synthetic heavy chain variable region CDR H2"
gagttcatcccaatctttggtgtctcaccctccgcacagaagttccagggc

SEQ ID NO: 1207 - protein, 13 aa, Artificial Sequence
  source: /note="Description of Artificial Sequence: Synthetic heavy chain variable region CDR H3"
ATRLYTLGSPFDN

SEQ ID NO: 1208 - DNA, 39 bp, Artificial Sequence
  source: /note="Description of Artificial Sequence: Synthetic heavy chain variable region CDR H3"
gcgacacgtctgtatacgttggggtccccttttgacaat

SEQ ID NO: 1209 - DNA, 330 bp, Artificial Sequence
  source: /note="Description of Artificial Sequence: Synthetic light chain variable region"
cagcctgtgctgactcagcctcgctcagtgtccgggtctcctggacagtcagtcaccatctcctgcactggaaccagtagtgatgttggtgattatgactatgtctcctggtaccaacacctcccaggcgaagtccccaaactcatagtttataatgtcattaagcggccctctggggtccctgatcgcttctctggctccaagtctggcaacacggcctccctgaccatctctgggctccaggctgaggatgaggctgactattactgctgctcatatgcaggcaggtatatttatgtcttcggcagtgggaccaagctcaccgtccta

SEQ ID NO: 1210 - protein, 110 aa, Artificial Sequence
  source: /note="Description of Artificial Sequence: Synthetic light chain variable region"
QPVLTQPRSVSGSPGQSVTISCTGTSSDVGDYDYVSWYQHLPGEVPKLIVYNVIKRPSGVPDRFSGSKSGNTASLTISGLQAEDEADYYCCSYAGRYIYVFGSGTKLTVL

SEQ ID NO: 1211 - protein, 14 aa, Artificial Sequence
  source: /note="Description of Artificial Sequence: Synthetic light chain variable region CDR L1"
TGTSSDVGDYDYVS

SEQ ID NO: 1212 - DNA, 42 bp, Artificial Sequence
  source: /note="Description of Artificial Sequence: Synthetic light chain variable region CDR L1"
actggaaccagtagtgatgttggtgattatgactatgtctcc

SEQ ID NO: 1213 - protein, 7 aa, Artificial Sequence
  source: /note="Description of Artificial Sequence: Synthetic light chain variable region CDR L2"
NVIKRPS

SEQ ID NO: 1214 - DNA, 21 bp, Artificial Sequence
  source: /note="Description of Artificial Sequence: Synthetic light chain variable region CDR L2"
aatgtcattaagcggccctct

SEQ ID NO: 1215 - protein, 10 aa, Artificial Sequence
  source: /note="Description of Artificial Sequence: Synthetic light chain variable region CDR L3"
CSYAGRYIYV

SEQ ID NO: 1216 - DNA, 30 bp, Artificial Sequence
  source: /note="Description of Artificial Sequence: Synthetic light chain variable region CDR L3"
tgctcatatgcaggcaggtatatttatgtc

SEQ ID NO: 1217 - DNA, 375 bp, Artificial Sequence
  source: /note="Description of Artificial Sequence: Synthetic heavy chain variable region"
gaggtgcagctgttggagtctgggggaggcctggtcaagcctggggagtccctgagactctcctgtgcagcctctggattcacccttagtggctactacatgaattgggtccgccaggctccagggagggggctggagtgggtctcctccattagtggtggtagtaattacataaactacgccgactcagtgaagggccggttcaccatctccagagacaacgccaagaactcactctatctgcaaatgaacagcctgagagtcgaggacacggctgtctattactgtgcgagggtccacgtggatttagtgactacgatttttggggttgactttgacttctggggccagggaaccctggtcactgtctcctca

SEQ ID NO: 1218 - protein, 125 aa, Artificial Sequence
  source: /note="Description of Artificial Sequence: Synthetic heavy chain variable region"
EVQLLESGGGLVKPGESLRLSCAASGFTLSGYYMNWVRQAPGRGLEWVSSISGGSNYINYADSVKGRFTISRDNAKNSLYLQMNSLRVEDTAVYYCARVHVDLVTTIFGVDFDFWGQGTLVTVSS

SEQ ID NO: 1219 - protein, 9 aa, Artificial Sequence
  source: /note="Description of Artificial Sequence: Synthetic heavy chain variable region CDR H1"
FTLSGYYMN

SEQ ID NO: 1220 - DNA, 27 bp, Artificial Sequence
  source: /note="Description of Artificial Sequence: Synthetic heavy chain variable region CDR H1"
ttcacccttagtggctactacatgaat

SEQ ID NO: 1221 - protein, 17 aa, Artificial Sequence
  source: /note="Description of Artificial Sequence: Synthetic heavy chain variable region CDR H2"
SISGGSNYINYADSVKG

SEQ ID NO: 1222 - DNA, 51 bp, Artificial Sequence
  source: /note="Description of Artificial Sequence: Synthetic heavy chain variable region CDR H2"
tccattagtggtggtagtaattacataaactacgccgactcagtgaagggc

SEQ ID NO: 1223 - protein, 18 aa, Artificial Sequence
  source: /note="Description of Artificial Sequence: Synthetic heavy chain variable region CDR H3"
ARVHVDLVTTIFGVDFDF

SEQ ID NO: 1224 - DNA, 54 bp, Artificial Sequence
  source: /note="Description of Artificial Sequence: Synthetic heavy chain variable region CDR H3"
gcgagggtccacgtggatttagtgactacgatttttggggttgactttgacttc

SEQ ID NO: 1225 - DNA, 333 bp, Artificial Sequence
  source: /note="Description of Artificial Sequence: Synthetic light chain variable region"
cagtctgtgctgacgcagccgccctcagtgtctggggccccagggcagagggtcaccatctcctgcactgggagcagctccaacatcggggcagggtatgatgtacactggtaccagcaacttccaggaacagcccccaaactcctcatctatggtaacaccaatcggcccgcaggggtccctgaccgattctctggctccaagtctggctcctcagcctccctggccatcactgggctccaggctgaggatgaggctgattattactgccagtcgtatgacagcagcctgagtggtgcgatcttcggcggagggaccaagctcaccgtccta

SEQ ID NO: 1226 - protein, 111 aa, Artificial Sequence
  source: /note="Description of Artificial Sequence: Synthetic light chain variable region"
QSVLTQPPSVSGAPGQRVTISCTGSSSNIGAGYDVHWYQQLPGTAPKLLIYGNTNRPAGVPDRFSGSKSGSSASLAITGLQAEDEADYYCQSYDSSLSGAIFGGGTKLTVL

SEQ ID NO: 1227 - protein, 14 aa, Artificial Sequence
  source: /note="Description of Artificial Sequence: Synthetic light chain variable region CDR L1"
TGSSSNIGAGYDVH

SEQ ID NO: 1228 - DNA, 42 bp, Artificial Sequence
  source: /note="Description of Artificial Sequence: Synthetic light chain variable region CDR L1"
actgggagcagctccaacatcggggcagggtatgatgtacac

SEQ ID NO: 1229 - protein, 7 aa, Artificial Sequence
  source: /note="Description of Artificial Sequence: Synthetic light chain variable region CDR L2"
GNTNRPA

SEQ ID NO: 1230 - DNA, 21 bp, Artificial Sequence
  source: /note="Description of Artificial Sequence: Synthetic light chain variable region CDR L2"
ggtaacaccaatcggcccgca

SEQ ID NO: 1231 - protein, 11 aa, Artificial Sequence
  source: /note="Description of Artificial Sequence: Synthetic light chain variable region CDR L3"
QSYDSSLSGAI

SEQ ID NO: 1232 - DNA, 33 bp, Artificial Sequence
  source: /note="Description of Artificial Sequence: Synthetic light chain variable region CDR L3"
cagtcgtatgacagcagcctgagtggtgcgatc

SEQ ID NO: 1233 - DNA, 366 bp, Artificial Sequence
  source: /note="Description of Artificial Sequence: Synthetic heavy chain variable region"
caggtgcagctgcaggagtccggagctgaggtgaagatgcgtggggcctcagtgaaggtctcctgcaaggcttctggttacacctttagtcactatggtatcagttgggtgcgacaggcccctggacaagggctcgagtggatgggatttatcagcgcttacaatcataacacaaagtatgcacagaccgtccagggcagagtcaccttgagcacagacacatccacgagcacagcctacatggagctgaggagcctgagacctgacgacacggccatgtattactgtgcgagagaacccccgagtgacgatgctgcaaggctctttgactactggggccagggaaccctggtcactgtctcctca

SEQ ID NO: 1234 - protein, 122 aa, Artificial Sequence
  source: /note="Description of Artificial Sequence: Synthetic heavy chain variable region"
QVQLQESGAEVKMRGASVKVSCKASGYTFSHYGISWVRQAPGQGLEWMGFISAYNHNTKYAQTVQGRVTLSTDTSTSTAYMELRSLRPDDTAMYYCAREPPSDDAARLFDYWGQGTLVTVSS

SEQ ID NO: 1235 - protein, 9 aa, Artificial Sequence
  source: /note="Description of Artificial Sequence: Synthetic heavy chain variable region CDR H1"
YTFSHYGIS

SEQ ID NO: 1236 - DNA, 27 bp, Artificial Sequence
  source: /note="Description of Artificial Sequence: Synthetic heavy chain variable region CDR H1"
tacacctttagtcactatggtatcagt

SEQ ID NO: 1237 - protein, 17 aa, Artificial Sequence
  source: /note="Description of Artificial Sequence: Synthetic heavy chain variable region CDR H2"
FISAYNHNTKYAQTVQG

SEQ ID NO: 1238 - DNA, 51 bp, Artificial Sequence
  source: /note="Description of Artificial Sequence: Synthetic heavy chain variable region CDR H2"
tttatcagcgcttacaatcataacacaaagtatgcacagaccgtccagggc

SEQ ID NO: 1239 - protein, 15 aa, Artificial Sequence
  source: /note="Description of Artificial Sequence: Synthetic heavy chain variable region CDR H3"
AREPPSDDAARLFDY

SEQ ID NO: 1240 - DNA, 45 bp, Artificial Sequence
  source: /note="Description of Artificial Sequence: Synthetic heavy chain variable region CDR H3"
gcgagagaacccccgagtgacgatgctgcaaggctctttgactac

SEQ ID NO: 1241 - DNA, 336 bp, Artificial Sequence
  source: /note="Description of Artificial Sequence: Synthetic light chain variable region"
gaaacgacactcacgcagtctccacgctccctgcccgtcacccttggacagccggcctccatctcctgcaggtctagtcaaagcctcgtgtacagtgaaggaaacacctacttgagttggtttcagcagaggccaggccaatctccaaggcgcctaatttataaggtttctaaccgggactctggggtcccagacagattcagcggcagtgggtcaggcactgatttcacactgaaaatcagcagggtggaggctgaggatgttggggtttattattgcatgcaaggtacacagtggcctgtgacattcggccaagggaccaaggtggaaatcaaa

SEQ ID NO: 1242 - protein, 112 aa, Artificial Sequence
  source: /note="Description of Artificial Sequence: Synthetic light chain variable region"
ETTLTQSPRSLPVTLGQPASISCRSSQSLVYSEGNTYLSWFQQRPGQSPRRLIYKVSNRDSGVPDRFSGSGSGTDFTLKISRVEAEDVGVYYCMQGTQWPVTFGQGTKVEIK

SEQ ID NO: 1243 - protein, 16 aa, Artificial Sequence
  source: /note="Description of Artificial Sequence: Synthetic light chain variable region CDR L1"
RSSQSLVYSEGNTYLS

SEQ ID NO: 1244 - DNA, 48 bp, Artificial Sequence
  source: /note="Description of Artificial Sequence: Synthetic light chain variable region CDR L1"
aggtctagtcaaagcctcgtgtacagtgaaggaaacacctacttgagt

SEQ ID NO: 1245 - protein, 7 aa, Artificial Sequence
  source: /note="Description of Artificial Sequence: Synthetic light chain variable region CDR L2"
KVSNRDS

SEQ ID NO: 1246 - DNA, 21 bp, Artificial Sequence
  source: /note="Description of Artificial Sequence: Synthetic light chain variable region CDR L2"
aaggtttctaaccgggactct

SEQ ID NO: 1247 - protein, 9 aa, Artificial Sequence
  source: /note="Description of Artificial Sequence: Synthetic light chain variable region CDR L3"
MQGTQWPVT

SEQ ID NO: 1248 - DNA, 27 bp, Artificial Sequence
  source: /note="Description of Artificial Sequence: Synthetic light chain variable region CDR L3"
atgcaaggtacacagtggcctgtgaca

SEQ ID NO: 1249 - DNA, 354 bp, Artificial Sequence
  source: /note="Description of Artificial Sequence: Synthetic heavy chain variable region"
caggtccagctggtacagtctggggctgaggtgaagaagcctggggcctcagtgagggtctcctgcaaggtttacggtcacaccctcagtgaattatccatgcactgggtgcgacagggtcctgaaggaggccttgagtggatgggagcttttgatcatgaagatggtgaaggaatctacccacagaagttccagggcagaatcaccatgaccgcggacatatcgacagacacagcccacatggaactgaggagcctcagatctgaggacacggccgtttattactgtgcaacaccgaccccggttggagcaacggacttctggggccagggaaccctggtcaccgtctcctca

SEQ ID NO: 1250 - protein, 118 aa, Artificial Sequence
  source: /note="Description of Artificial Sequence: Synthetic heavy chain variable region"
QVQLVQSGAEVKKPGASVRVSCKVYGHTLSELSMHWVRQGPEGGLEWMGAFDHEDGEGIYPQKFQGRITMTADISTDTAHMELRSLRSEDTAVYYCATPTPVGATDFWGQGTLVTVSS

SEQ ID NO: 1251 - protein, 9 aa, Artificial Sequence
  source: /note="Description of Artificial Sequence: Synthetic heavy chain variable region CDR H1"
HTLSELSMH

SEQ ID NO: 1252 - DNA, 27 bp, Artificial Sequence
  source: /note="Description of Artificial Sequence: Synthetic heavy chain variable region CDR H1"
cacaccctcagtgaattatccatgcac

SEQ ID NO: 1253 - protein, 17 aa, Artificial Sequence
  source: /note="Description of Artificial Sequence: Synthetic heavy chain variable region CDR H2"
AFDHEDGEGIYPQKFQG

SEQ ID NO: 1254 - DNA, 51 bp, Artificial Sequence
  source: /note="Description of Artificial Sequence: Synthetic heavy chain variable region CDR H2"
gcttttgatcatgaagatggtgaaggaatctacccacagaagttccagggc

SEQ ID NO: 1255 - protein, 11 aa, Artificial Sequence
  source: /note="Description of Artificial Sequence: Synthetic heavy chain variable region CDR H3"
ATPTPVGATDF

SEQ ID NO: 1256 - DNA, 33 bp, Artificial Sequence
  source: /note="Description of Artificial Sequence: Synthetic heavy chain variable region CDR H3"
gcaacaccgaccccggttggagcaacggacttc

SEQ ID NO: 1257 - DNA, 321 bp, Artificial Sequence
  source: /note="Description of Artificial Sequence: Synthetic light chain variable region"
gacatccgggtgacccagtctccatcctccctgtctgcatctgtaggagacagagtcaccatcacttgccgggcaagtcagagcattagcagctacttaaattggtatcaacagaaaccaggaaaagcccctaagctcctgatctatgctgcatccactttgcagagggggggcccatcaagattcagtggcagtggatctgggacagatttcactctcagcatcagcagtctgcaacctgaagattttgcaacttactattgtcaacagacttacattattccatacacttttggccaggggaccaagctggagatcaaa

SEQ ID NO: 1258 - protein, 107 aa, Artificial Sequence
  source: /note="Description of Artificial Sequence: Synthetic light chain variable region"
DIRVTQSPSSLSASVGDRVTITCRASQSISSYLNWYQQKPGKAPKLLIYAASTLQRGGPSRFSGSGSGTDFTLSISSLQPEDFATYYCQQTYIIPYTFGQGTKLEIK

SEQ ID NO: 1259 - protein, 11 aa, Artificial Sequence
  source: /note="Description of Artificial Sequence: Synthetic light chain variable region CDR L1"
RASQSISSYLN

SEQ ID NO: 1260 - DNA, 33 bp, Artificial Sequence
  source: /note="Description of Artificial Sequence: Synthetic light chain variable region CDR L1"
cgggcaagtcagagcattagcagctacttaaat

SEQ ID NO: 1261 - protein, 7 aa, Artificial Sequence
  source: /note="Description of Artificial Sequence: Synthetic light chain variable region CDR L2"
AASTLQR

SEQ ID NO: 1262 - DNA, 21 bp, Artificial Sequence
  source: /note="Description of Artificial Sequence: Synthetic light chain variable region CDR L2"
gctgcatccactttgcagagg

SEQ ID NO: 1263 - protein, 9 aa, Artificial Sequence
  source: /note="Description of Artificial Sequence: Synthetic light chain variable region CDR L3"
QQTYIIPYT

SEQ ID NO: 1264 - DNA, 27 bp, Artificial Sequence
  source: /note="Description of Artificial Sequence: Synthetic light chain variable region CDR L3"
caacagacttacattattccatacact

SEQ ID NO: 1265 - DNA, 369 bp, Artificial Sequence
  source: /note="Description of Artificial Sequence: Synthetic heavy chain variable region"
caggtgcagctgcaggagtcgggcccgggactggtgaagccttcggagaccctgtccctcacctgcagtgtctctggtggctccatcaccaatgttaattactactggggctggatccgccagccccccgggaagggcctggagtggattgggagtatctattataatggaaacacctactacaacccgtccctccagagtcgagtcaccatgtccgtggacacgtccaagaaccacttctccctgaggctgacgtctgtgaccgccgcagacacggctgtatatttttgtgcgagagaggggcctaattgggaattgttgaatgctttcgatatctggggccaagggaccacggtcaccgtctcctca

SEQ ID NO: 1266 - protein, 123 aa, Artificial Sequence
  source: /note="Description of Artificial Sequence: Synthetic heavy chain variable region"
QVQLQESGPGLVKPSETLSLTCSVSGGSITNVNYYWGWIRQPPGKGLEWIGSIYYNGNTYYNPSLQSRVTMSVDTSKNHFSLRLTSVTAADTAVYFCAREGPNWELLNAFDIWGQGTTVTVSS

SEQ ID NO: 1267 - protein, 11 aa, Artificial Sequence
  source: /note="Description of Artificial Sequence: Synthetic heavy chain variable region CDR H1"
GSITNVNYYWG

SEQ ID NO: 1268 - DNA, 33 bp, Artificial Sequence
  source: /note="Description of Artificial Sequence: Synthetic heavy chain variable region CDR H1"
ggctccatcaccaatgttaattactactggggc

SEQ ID NO: 1269 - protein, 16 aa, Artificial Sequence
  source: /note="Description of Artificial Sequence: Synthetic heavy chain variable region CDR H2"
SIYYNGNTYYNPSLQS

SEQ ID NO: 1270 - DNA, 48 bp, Artificial Sequence
  source: /note="Description of Artificial Sequence: Synthetic heavy chain variable region CDR H2"
agtatctattataatggaaacacctactacaacccgtccctccagagt

SEQ ID NO: 1271 - protein, 15 aa, Artificial Sequence
  source: /note="Description of Artificial Sequence: Synthetic heavy chain variable region CDR H3"
AREGPNWELLNAFDI

SEQ ID NO: 1272 - DNA, 45 bp, Artificial Sequence
  source: /note="Description of Artificial Sequence: Synthetic heavy chain variable region CDR H3"
gcgagagaggggcctaattgggaattgttgaatgctttcgatatc

SEQ ID NO: 1273 - DNA, 324 bp, Artificial Sequence
  source: /note="Description of Artificial Sequence: Synthetic light chain variable region"
gacatccaggtgacccagccaccctcggtgtcagtggccccaggacagacggccaggattacctgtgggggaaacaacattggaagtaaaaatgtgcactggtaccagcagaagccaggccgggcccctgtcttggtcgtctatgaggatacccaccggccctcagggatccctgagcgattctctggctccaactctgggaacacggccaccctgaccatcagtagggtcgaagccggggatgaggccgactattactgtcaggtgtgggatactagtagtgatcatgtggtattcggcggagggaccaagctcaccgtccta

SEQ ID NO: 1274 - protein, 108 aa, Artificial Sequence
  source: /note="Description of Artificial Sequence: Synthetic light chain variable region"
DIQVTQPPSVSVAPGQTARITCGGNNIGSKNVHWYQQKPGRAPVLVVYEDTHRPSGIPERFSGSNSGNTATLTISRVEAGDEADYYCQVWDTSSDHVVFGGGTKLTVL

SEQ ID NO: 1275 - protein, 11 aa, Artificial Sequence
  source: /note="Description of Artificial Sequence: Synthetic light chain variable region CDR L1"
GGNNIGSKNVH

SEQ ID NO: 1276 - DNA, 33 bp, Artificial Sequence
  source: /note="Description of Artificial Sequence: Synthetic light chain variable region CDR L1"
gggggaaacaacattggaagtaaaaatgtgcac

SEQ ID NO: 1277 - protein, 7 aa, Artificial Sequence
  source: /note="Description of Artificial Sequence: Synthetic light chain variable region CDR L2"
EDTHRPS

SEQ ID NO: 1278 - DNA, 21 bp, Artificial Sequence
  source: /note="Description of Artificial Sequence: Synthetic light chain variable region CDR L2"
gaggatacccaccggccctca

SEQ ID NO: 1279 - protein, 11 aa, Artificial Sequence
  source: /note="Description of Artificial Sequence: Synthetic light chain variable region CDR L3"
QVWDTSSDHVV

SEQ ID NO: 1280 - DNA, 33 bp, Artificial Sequence
  source: /note="Description of Artificial Sequence: Synthetic light chain variable region CDR L3"
caggtgtgggatactagtagtgatcatgtggta

SEQ ID NO: 1281 - DNA, 363 bp, Artificial Sequence
  source: /note="Description of Artificial Sequence: Synthetic heavy chain variable region"
caggtccagctggtgcagtctgggggaggcctggtcaagcctgaggggtccctgagactctcctgtgcagcctctggattcaccttcagtagctatagcatgaactgggtccgccaggctccagggaaggggctggagtgggtctcatccattagtagtagtagtagttacatatactacgcagactcagtgaagggccgattcaccatctccagagacaacgccaagaactcactgtatctgcaaatgaacagcctgagagccgaggacacggctgtgtattactgtgcgagagtctcaacagaattgggctactactacatggacgtctggggcaaagggaccacggtcactgtctcctca

SEQ ID NO: 1282 - protein, 121 aa, Artificial Sequence
  source: /note="Description of Artificial Sequence: Synthetic heavy chain variable region"
QVQLVQSGGGLVKPEGSLRLSCAASGFTFSSYSMNWVRQAPGKGLEWVSSISSSSSYIYYADSVKGRFTISRDNAKNSLYLQMNSLRAEDTAVYYCARVSTELGYYYMDVWGKGTTVTVSS

SEQ ID NO: 1283 - protein, 9 aa, Artificial Sequence
  source: /note="Description of Artificial Sequence: Synthetic heavy chain variable region CDR H1"
FTFSSYSMN

SEQ ID NO: 1284 - DNA, 27 bp, Artificial Sequence
  source: /note="Description of Artificial Sequence: Synthetic heavy chain variable region CDR H1"
ttcaccttcagtagctatagcatgaac

SEQ ID NO: 1285 - protein, 17 aa, Artificial Sequence
  source: /note="Description of Artificial Sequence: Synthetic heavy chain variable region CDR H2"
SISSSSSYIYYADSVKG

SEQ ID NO: 1286 - DNA, 51 bp, Artificial Sequence; identical to SEQ ID NO: 726
  source: /note="Description of Artificial Sequence: Synthetic heavy chain variable region CDR H2"

SEQ ID NO: 1287 - protein, 14 aa, Artificial Sequence
  source: /note="Description of Artificial Sequence: Synthetic heavy chain variable region CDR H3"
ARVSTELGYYYMDV

SEQ ID NO: 1288 - DNA, 42 bp, Artificial Sequence
  source: /note="Description of Artificial Sequence: Synthetic heavy chain variable region CDR H3"
gcgagagtctcaacagaattgggctactactacatggacgtc

SEQ ID NO: 1289 - DNA, 330 bp, Artificial Sequence
  source: /note="Description of Artificial Sequence: Synthetic light chain variable region"
cagtctgtcctgacgcagccgccctcagtgtctggggccccagggcagagggtcaccatctcctgcactgggagcagctccaacatcggggcaggttatgatgtacactggtaccagcagcttccaggaacagcccccaaactcctcatctatggtaacagcaatcggccctcaggggtccctgaccgattctctggctccaagtctggcacctcagcctccctggccatcactgggctccaggctgaggatgaggctgattattactgccagtcctatgacagcagcctgagtgtggtattcggcggagggaccaagctgaccgtccta

SEQ ID NO: 1290 - protein, 110 aa, Artificial Sequence
  source: /note="Description of Artificial Sequence: Synthetic light chain variable region"
QSVLTQPPSVSGAPGQRVTISCTGSSSNIGAGYDVHWYQQLPGTAPKLLIYGNSNRPSGVPDRFSGSKSGTSASLAITGLQAEDEADYYCQSYDSSLSVVFGGGTKLTVL

SEQ ID NO: 1291 - protein, 14 aa, Artificial Sequence
  source: /note="Description of Artificial Sequence: Synthetic light chain variable region CDR L1"
TGSSSNIGAGYDVH

SEQ ID NO: 1292 - DNA, 42 bp, Artificial Sequence; identical to SEQ ID NO: 572
  source: /note="Description of Artificial Sequence: Synthetic light chain variable region CDR L1"

SEQ ID NO: 1293 - protein, 7 aa, Artificial Sequence
  source: /note="Description of Artificial Sequence: Synthetic light chain variable region CDR L2"
GNSNRPS

SEQ ID NO: 1294 - DNA, 21 bp, Artificial Sequence
  source: /note="Description of Artificial Sequence: Synthetic light chain variable region CDR L2"
ggtaacagcaatcggccctca

SEQ ID NO: 1295 - protein, 10 aa, Artificial Sequence
  source: /note="Description of Artificial Sequence: Synthetic light chain variable region CDR L3"
QSYDSSLSVV

SEQ ID NO: 1296 - DNA, 30 bp, Artificial Sequence
  source: /note="Description of Artificial Sequence: Synthetic light chain variable region CDR L3"
cagtcctatgacagcagcctgagtgtggta

SEQ ID NO: 1297 - DNA, 360 bp, Artificial Sequence
  source: /note="Description of Artificial Sequence: Synthetic heavy chain variable region"
caggtccagcttgtacagtctggggctgaggtgaagaagcctggggcctcagtgaagatttcctgcaaggcttcgggataccccttcagttcctatcctatgcattgggtgcgccaggcccccggacaaaggcttgagtggatgggatggatcaacgttgacaatgagaacacaaaatattcatggaagttccggggcagagtcaccattaccagggacacatccgcgagcacagtttacatggagctgagcagtctgatatctgaagacacggctgtgtattactgtgggagagactgggacggggcgatccgtgtcttggactactggggccagggaaccctggtcaccgtctcctca

SEQ ID NO: 1298 - protein, 120 aa, Artificial Sequence
  source: /note="Description of Artificial Sequence: Synthetic heavy chain variable region"
QVQLVQSGAEVKKPGASVKISCKASGYPFSSYPMHWVRQAPGQRLEWMGWINVDNENTKYSWKFRGRVTITRDTSASTVYMELSSLISEDTAVYYCGRDWDGAIRVLDYWGQGTLVTVSS

SEQ ID NO: 1299 - protein, 9 aa, Artificial Sequence
  source: /note="Description of Artificial Sequence: Synthetic heavy chain variable region CDR H1"
YPFSSYPMH

SEQ ID NO: 1300 - DNA, 27 bp, Artificial Sequence
  source: /note="Description of Artificial Sequence: Synthetic heavy chain variable region CDR H1"
taccccttcagttcctatcctatgcat

SEQ ID NO: 1301 - protein, 17 aa, Artificial Sequence
  source: /note="Description of Artificial Sequence: Synthetic heavy chain variable region CDR H2"
WINVDNENTKYSWKFRG

SEQ ID NO: 1302 - DNA, 51 bp, Artificial Sequence
  source: /note="Description of Artificial Sequence: Synthetic heavy chain variable region CDR H2"
tggatcaacgttgacaatgagaacacaaaatattcatggaagttccggggc

SEQ ID NO: 1303 - protein, 13 aa, Artificial Sequence
  source: /note="Description of Artificial Sequence: Synthetic heavy chain variable region CDR H3"
GRDWDGAIRVLDY

SEQ ID NO: 1304 - DNA, 39 bp, Artificial Sequence
  source: /note="Description of Artificial Sequence: Synthetic heavy chain variable region CDR H3"
gggagagactgggacggggcgatccgtgtcttggactac

SEQ ID NO: 1305 - DNA, 339 bp, Artificial Sequence
  source: /note="Description of Artificial Sequence: Synthetic light chain variable region"
gatattgtgatgactcagactccagactccctggctgtgtctctgggcgagagggccaccatcacctgcaagtccagccagagtgttttattcagctccgacaataagaactacttagcttggtaccagcagaaaccgggacagcctcctaaattgctcatttactgggcatctatccgggaatccggggtccctgaccgattcggtggcagcgggtctgggacacatttcactctcaccatcaccagcgtgcaggctgcagatgtggcagtttattactgtcagcaatattatggtaatttccccaccttcggccaagggacacgactggagattaaa

SEQ ID NO: 1306 - protein, 113 aa, Artificial Sequence
  source: /note="Description of Artificial Sequence: Synthetic light chain variable region"
DIVMTQTPDSLAVSLGERATITCKSSQSVLFSSDNKNYLAWYQQKPGQPPKLLIYWASIRESGVPDRFGGSGSGTHFTLTITSVQAADVAVYYCQQYYGNFPTFGQGTRLEIK

SEQ ID NO: 1307 - protein, 17 aa, Artificial Sequence
  source: /note="Description of Artificial Sequence: Synthetic light chain variable region CDR L1"
KSSQSVLFSSDNKNYLA

SEQ ID NO: 1308 - DNA, 51 bp, Artificial Sequence
  source: /note="Description of Artificial Sequence: Synthetic light chain variable region CDR L1"
aagtccagccagagtgttttattcagctccgacaataagaactacttagct

SEQ ID NO: 1309 - protein, 7 aa, Artificial Sequence
  source: /note="Description of Artificial Sequence: Synthetic light chain variable region CDR L2"
WASIRES

SEQ ID NO: 1310 - DNA, 21 bp, Artificial Sequence
  source: /note="Description of Artificial Sequence: Synthetic light chain variable region CDR L2"
tgggcatctatccgggaatcc

SEQ ID NO: 1311 - protein, 9 aa, Artificial Sequence
  source: /note="Description of Artificial Sequence: Synthetic light chain variable region CDR L3"
QQYYGNFPT

SEQ ID NO: 1312 - DNA, 27 bp, Artificial Sequence
  source: /note="Description of Artificial Sequence: Synthetic light chain variable region CDR L3"
cagcaatattatggtaatttccccacc

SEQ ID NO: 1313 - DNA, 372 bp, Artificial Sequence
  source: /note="Description of Artificial Sequence: Synthetic heavy chain variable region"
caggtccagctggtgcagtctgggggaggcgtggtccagcctgggaggtccctgagactttcctgtgcagcctctggattcaccttcagaaactatggcatgcactgggtccgccaggctccaggcaaggggctggagtgggtagcggctgcatcgtatgatgggagtagtaagtactttgcagacgccgtgaagggccgattcagcatctccagagacaataccaagaacacgctgtctctgcaaatgaccagcctgagagctgaggacacggctgtgtattactgtgcaagagaccccggagtgggaagttattataacgtggtgggtatggacgtctggggccaagggaccacggtcaccgtctcctca

SEQ ID NO: 1314 - protein, 124 aa, Artificial Sequence
  source: /note="Description of Artificial Sequence: Synthetic heavy chain variable region"
QVQLVQSGGGVVQPGRSLRLSCAASGFTFRNYGMHWVRQAPGKGLEWVAAASYDGSSKYFADAVKGRFSISRDNTKNTLSLQMTSLRAEDTAVYYCARDPGVGSYYNVVGMDVWGQGTTVTVSS

SEQ ID NO: 1315 - protein, 9 aa, Artificial Sequence
  source: /note="Description of Artificial Sequence: Synthetic heavy chain variable region CDR H1"
FTFRNYGMH

SEQ ID NO: 1316 - DNA, 27 bp, Artificial Sequence
  source: /note="Description of Artificial Sequence: Synthetic heavy chain variable region CDR H1"
ttcaccttcagaaactatggcatgcac

SEQ ID NO: 1317 - protein, 17 aa, Artificial Sequence
  source: /note="Description of Artificial Sequence: Synthetic heavy chain variable region CDR H2"
AASYDGSSKYFADAVKG

SEQ ID NO: 1318 - DNA, 51 bp, Artificial Sequence
  source: /note="Description of Artificial Sequence: Synthetic heavy chain variable region CDR H2"
gctgcatcgtatgatgggagtagtaagtactttgcagacgccgtgaagggc

SEQ ID NO: 1319 - protein, 17 aa, Artificial Sequence
  source: /note="Description of Artificial Sequence: Synthetic heavy chain variable region CDR H3"
ARDPGVGSYYNVVGMDV

SEQ ID NO: 1320 - DNA, 51 bp, Artificial Sequence
  source: /note="Description of Artificial Sequence: Synthetic heavy chain variable region CDR H3"
gcaagagaccccggagtgggaagttattataacgtggtgggtatggacgtc

SEQ ID NO: 1321 - DNA, 336 bp, Artificial Sequence
  source: /note="Description of Artificial Sequence: Synthetic light chain variable region"
gacatccggttgacccagtctccactctccctgcccgtcacccttggacagccggcctccatctcctgcaggtctagtcaaagcctcgtatacagtgatggaaacacctacttgaattggtttcagcagaggccaggccaatctccaaggcgcctaatttatagggtttctcaccgggactctggggtcccagacagattcagcggcagtgagtcaggcactgatttcacactgaaaatcagcagggtggaggctgaggatgttggcgtttattactgcatgcaaggtacacactggcctcctacgttcggccaagggaccaaggtggagatcaaa

SEQ ID NO: 1322 - protein, 112 aa, Artificial Sequence
  source: /note="Description of Artificial Sequence: Synthetic light chain variable region"
DIRLTQSPLSLPVTLGQPASISCRSSQSLVYSDGNTYLNWFQQRPGQSPRRLIYRVSHRDSGVPDRFSGSESGTDFTLKISRVEAEDVGVYYCMQGTHWPPTFGQGTKVEIK

SEQ ID NO: 1323 - protein, 16 aa, Artificial Sequence
  source: /note="Description of Artificial Sequence: Synthetic light chain variable region CDR L1"
RSSQSLVYSDGNTYLN

SEQ ID NO: 1324 - DNA, 48 bp, Artificial Sequence; identical to SEQ ID NO: 252
  source: /note="Description of Artificial Sequence: Synthetic light chain variable region CDR L1"

SEQ ID NO: 1325 - protein, 7 aa, Artificial Sequence
  source: /note="Description of Artificial Sequence: Synthetic light chain variable region CDR L2"
RVSHRDS

SEQ ID NO: 1326 - DNA, 21 bp, Artificial Sequence
  source: /note="Description of Artificial Sequence: Synthetic light chain variable region CDR L2"
agggtttctcaccgggactct

SEQ ID NO: 1327 - protein, 9 aa, Artificial Sequence
  source: /note="Description of Artificial Sequence: Synthetic light chain variable region CDR L3"
MQGTHWPPT

SEQ ID NO: 1328 - DNA, 27 bp, Artificial Sequence
  source: /note="Description of Artificial Sequence: Synthetic light chain variable region CDR L3"
atgcaaggtacacactggcctcctacg

SEQ ID NO: 1329 - DNA, 354 bp, Artificial Sequence
  source: /note="Description of Artificial Sequence: Synthetic heavy chain variable region"
caggtccagctggtgcagtctggggctgaggtgaagaagcctggggcctcagtgaaggtcgcctgcaaggtttccggatccagcctcactgaattgtccattcaatgggtgcgcttgcctcctggcaaacgccttgagtggctgggagcttttgatgctgaagatggtgcaccaatctactcaccgaaattccagggcagagtcaccatgaccgaggacagatcgacagagacagcctacatggaggtgaccagcctgagatctgaggacacggccctctattactgtgcgactccccttcccgcgggagcccttgacaagtggggccagggaaccctggtcaccgtctcctca

SEQ ID NO: 1330 - protein, 118 aa, Artificial Sequence
  source: /note="Description of Artificial Sequence: Synthetic heavy chain variable region"
QVQLVQSGAEVKKPGASVKVACKVSGSSLTELSIQWVRLPPGKRLEWLGAFDAEDGAPIYSPKFQGRVTMTEDRSTETAYMEVTSLRSEDTALYYCATPLPAGALDKWGQGTLVTVSS

SEQ ID NO: 1331 - protein, 9 aa, Artificial Sequence
  source: /note="Description of Artificial Sequence: Synthetic heavy chain variable region CDR H1"
SSLTELSIQ

SEQ ID NO: 1332 - DNA, 27 bp, Artificial Sequence
  source: /note="Description of Artificial Sequence: Synthetic heavy chain variable region CDR H1"
tccagcctcactgaattgtccattcaa

SEQ ID NO: 1333 - protein, 17 aa, Artificial Sequence
  source: /note="Description of Artificial Sequence: Synthetic heavy chain variable region CDR H2"
AFDAEDGAPIYSPKFQG

SEQ ID NO: 1334 - DNA, 51 bp, Artificial Sequence
  source: /note="Description of Artificial Sequence: Synthetic heavy chain variable region CDR H2"
gcttttgatgctgaagatggtgcaccaatctactcaccgaaattccagggc

SEQ ID NO: 1335 - protein, 11 aa, Artificial Sequence
  source: /note="Description of Artificial Sequence: Synthetic heavy chain variable region CDR H3"
ATPLPAGALDK

SEQ ID NO: 1336 - DNA, 33 bp, Artificial Sequence
  source: /note="Description of Artificial Sequence: Synthetic heavy chain variable region CDR H3"
gcgactccccttcccgcgggagcccttgacaag

SEQ ID NO: 1337 - DNA, 321 bp, Artificial Sequence
  source: /note="Description of Artificial Sequence: Synthetic light chain variable region"
gacatccagatgacccagtctccatcctccctgtctgcttccgtaggagacagagtcaccatctcttgccgggcaagtcagactataagcagatatttaaattggtatcaggtcaagccagggacagcccctaagctcctaatctacgctgcatccagtttgcaaactggggtcccatcaagattcagtgccagtggatctggggcagatttcactctcaccatcagcagtctgcaacctgaagattttgcgacttaccactgtcaacaaacttacattattccgtacacttttggccaggggaccaaagtggatatcaaa

SEQ ID NO: 1338 - protein, 107 aa, Artificial Sequence
  source: /note="Description of Artificial Sequence: Synthetic light chain variable region"
DIQMTQSPSSLSASVGDRVTISCRASQTISRYLNWYQVKPGTAPKLLIYAASSLQTGVPSRFSASGSGADFTLTISSLQPEDFATYHCQQTYIIPYTFGQGTKVDIK

SEQ ID NO: 1339 - protein, 11 aa, Artificial Sequence
  source: /note="Description of Artificial Sequence: Synthetic light chain variable region CDR L1"
RASQTISRYLN

SEQ ID NO: 1340 - DNA, 33 bp, Artificial Sequence
  source: /note="Description of Artificial Sequence: Synthetic light chain variable region CDR L1"
cgggcaagtcagactataagcagatatttaaat

SEQ ID NO: 1341 - protein, 7 aa, Artificial Sequence
  source: /note="Description of Artificial Sequence: Synthetic light chain variable region CDR L2"
AASSLQT

SEQ ID NO: 1342 - DNA, 21 bp, Artificial Sequence
  source: /note="Description of Artificial Sequence: Synthetic light chain variable region CDR L2"
gctgcatccagtttgcaaact

SEQ ID NO: 1343 - protein, 9 aa, Artificial Sequence
  source: /note="Description of Artificial Sequence: Synthetic light chain variable region CDR L3"
QQTYIIPYT

SEQ ID NO: 1344 - DNA, 27 bp, Artificial Sequence
  source: /note="Description of Artificial Sequence: Synthetic light chain variable region CDR L3"
caacaaacttacattattccgtacact

SEQ ID NO: 1345 - DNA, 381 bp, Artificial Sequence
  source: /note="Description of Artificial Sequence: Synthetic heavy chain variable region"
gaggtgcagctggtggagtcgggcccaggactggtgaagccttcacagaccctgtccctcacctgcactgtctctgatgtcctcatcagcagtggtgattactactggagttggatccgccagtccccagggaagggcctggagtggcttgggtacatctattataccgggaagaccaaatataatccgtccctcgagagtcgaattaccatgtcagtagacacgtccaagaaccagttctccctgaggttgagctctgttactgccgcagacacggccgtatatttctgtaccagagatctgggatatagcacctcgtccccctccttttactatgggatggacgtctggggccaagggaccacggtcaccgtctcctca

SEQ ID NO: 1346 - protein, 127 aa, Artificial Sequence
  source: /note="Description of Artificial Sequence: Synthetic heavy chain variable region"
EVQLVESGPGLVKPSQTLSLTCTVSDVLISSGDYYWSWIRQSPGKGLEWLGYIYYTGKTKYNPSLESRITMSVDTSKNQFSLRLSSVTAADTAVYFCTRDLGYSTSSPSFYYGMDVWGQGTTVTVSS

SEQ ID NO: 1347 - protein, 11 aa, Artificial Sequence
  source: /note="Description of Artificial Sequence: Synthetic heavy chain variable region CDR H1"
VLISSGDYYWS

SEQ ID NO: 1348 - DNA, 33 bp, Artificial Sequence
  source: /note="Description of Artificial Sequence: Synthetic heavy chain variable region CDR H1"
gtcctcatcagcagtggtgattactactggagt

SEQ ID NO: 1349 - protein, 16 aa, Artificial Sequence
  source: /note="Description of Artificial Sequence: Synthetic heavy chain variable region CDR H2"
YIYYTGKTKYNPSLES

SEQ ID NO: 1350 - DNA, 48 bp, Artificial Sequence
  source: /note="Description of Artificial Sequence: Synthetic heavy chain variable region CDR H2"
tacatctattataccgggaagaccaaatataatccgtccctcgagagt

SEQ ID NO: 1351 - protein, 19 aa, Artificial Sequence
  source: /note="Description of Artificial Sequence: Synthetic heavy chain variable region CDR H3"
TRDLGYSTSSPSFYYGMDV

SEQ ID NO: 1352 - DNA, 57 bp, Artificial Sequence
  source: /note="Description of Artificial Sequence: Synthetic heavy chain variable region CDR H3"
accagagatctgggatatagcacctcgtccccctccttttactatgggatggacgtc

SEQ ID NO: 1353 - DNA, 321 bp, Artificial Sequence
  source: /note="Description of Artificial Sequence: Synthetic light chain variable region"
gaaattgtgttgacacagtctccagccaccctgtctttgtctccaggggaaagagccaccctctcctgcagggccagtcagagtgttgggacctacttagcctggtaccaacagaaacctggccaggctcccaggctcctcatctatgatgcatcttacagggtcactggcatcccagccaggttcagtgccagtgggtctgcgacagacttcactctcaccatcagcagcctagagcctgaagattttgcagtttatttctgtcagcagcgtaccaactggccgatcaccttcggccaggggacacgactggagattaaa

SEQ ID NO: 1354 - protein, 107 aa, Artificial Sequence
  source: /note="Description of Artificial Sequence: Synthetic light chain variable region"
EIVLTQSPATLSLSPGERATLSCRASQSVGTYLAWYQQKPGQAPRLLIYDASYRVTGIPARFSASGSATDFTLTISSLEPEDFAVYFCQQRTNWPITFGQGTRLEIK

SEQ ID NO: 1355 - protein, 11 aa, Artificial Sequence
  source: /note="Description of Artificial Sequence: Synthetic light chain variable region CDR L1"
RASQSVGTYLA

SEQ ID NO: 1356 - DNA, 33 bp, Artificial Sequence
  source: /note="Description of Artificial Sequence: Synthetic light chain variable region CDR L1"
agggccagtcagagtgttgggacctacttagcc

SEQ ID NO: 1357 - protein, 7 aa, Artificial Sequence
  source: /note="Description of Artificial Sequence: Synthetic light chain variable region CDR L2"
DASYRVT

SEQ ID NO: 1358 - DNA, 21 bp, Artificial Sequence
  source: /note="Description of Artificial Sequence: Synthetic light chain variable region CDR L2"
gatgcatcttacagggtcact

SEQ ID NO: 1359 - protein, 9 aa, Artificial Sequence
  source: /note="Description of Artificial Sequence: Synthetic light chain variable region CDR L3"
QQRTNWPIT

SEQ ID NO: 1360 - DNA, 27 bp, Artificial Sequence
  source: /note="Description of Artificial Sequence: Synthetic light chain variable region CDR L3"
cagcagcgtaccaactggccgatcacc

SEQ ID NO: 1361 - DNA, 366 bp, Artificial Sequence
  source: /note="Description of Artificial Sequence: Synthetic heavy chain variable region"
caggtccagcttgtgcagtctggacctgaggtgaagaagcctggggcctcagtgacggtctcctgcaaggcttccggttacacctttagccattacggtattagttgggtgcgacaggcccctggacaagggcttgagtggatggggtggatcagcgcgtaccatggtcagacaaactatgcacagaacttccagggcagagtcaccatgaccacagacacatcctcgaacacagcctacatggaggtcaggagcctgagatctgacgacacggccgtttatttctgtgcgagagatgtcttttcgaaaacagcagctcgaatctttgactactggggccagggaaccctggtcaccgtctcctca

SEQ ID NO: 1362 - protein, 122 aa, Artificial Sequence
  source: /note="Description of Artificial Sequence: Synthetic heavy chain variable region"
QVQLVQSGPEVKKPGASVTVSCKASGYTFSHYGISWVRQAPGQGLEWMGWISAYHGQTNYAQNFQGRVTMTTDTSSNTAYMEVRSLRSDDTAVYFCARDVFSKTAARIFDYWGQGTLVTVSS

SEQ ID NO: 1363 - protein, 9 aa, Artificial Sequence
  source: /note="Description of Artificial Sequence: Synthetic heavy chain variable region CDR H1"
YTFSHYGIS

SEQ ID NO: 1364 - DNA, 27 bp, Artificial Sequence
  source: /note="Description of Artificial Sequence: Synthetic heavy chain variable region CDR H1"
tacacctttagccattacggtattagt

SEQ ID NO: 1365 - protein, 17 aa, Artificial Sequence
  source: /note="Description of Artificial Sequence: Synthetic heavy chain variable region CDR H2"
WISAYHGQTNYAQNFQG

SEQ ID NO: 1366 - DNA, 51 bp, Artificial Sequence
  source: /note="Description of Artificial Sequence: Synthetic heavy chain variable region CDR H2"
tggatcagcgcgtaccatggtcagacaaactatgcacagaacttccagggc

SEQ ID NO: 1367 - protein, 15 aa, Artificial Sequence
  source: /note="Description of Artificial Sequence: Synthetic heavy chain variable region CDR H3"
ARDVFSKTAARIFDY

SEQ ID NO: 1368 - DNA, 45 bp, Artificial Sequence
  source: /note="Description of Artificial Sequence: Synthetic heavy chain variable region CDR H3"
gcgagagatgtcttttcgaaaacagcagctcgaatctttgactac

SEQ ID NO: 1369 - DNA, 336 bp, Artificial Sequence
  source: /note="Description of Artificial Sequence: Synthetic light chain variable region"
gaaattgtattgacgcagtctccactctccctgcccgtcacccttggacagccggcctccatctcctgcaggtctagtcaaagcctcgaatatagtgacggaaacacctacttgagttggtttcagcagaggccaggccaatctccaaggcgcctaatttataaggtttctaaccgggactctggggtcccagacagattcagcggcagtcagtcaggcactgatttcacactgaaaatcagcagggtggaggctgaggatgttggggtttattactgcatgcaagctacagactggccggtcacgttcggccaagggaccaagctggagatcaaa

SEQ ID NO: 1370 - protein, 112 aa, Artificial Sequence
  source: /note="Description of Artificial Sequence: Synthetic light chain variable region"
EIVLTQSPLSLPVTLGQPASISCRSSQSLEYSDGNTYLSWFQQRPGQSPRRLIYKVSNRDSGVPDRFSGSQSGTDFTLKISRVEAEDVGVYYCMQATDWPVTFGQGTKLEIK

SEQ ID NO: 1371 - protein, 16 aa, Artificial Sequence
  source: /note="Description of Artificial Sequence: Synthetic light chain variable region CDR L1"
RSSQSLEYSDGNTYLS

SEQ ID NO: 1372 - DNA, 48 bp, Artificial Sequence
  source: /note="Description of Artificial Sequence: Synthetic light chain variable region CDR L1"
aggtctagtcaaagcctcgaatatagtgacggaaacacctacttgagt

SEQ ID NO: 1373 - protein, 7 aa, Artificial Sequence
  source: /note="Description of Artificial Sequence: Synthetic light chain variable region CDR L2"
KVSNRDS

SEQ ID NO: 1374 - DNA, 21 bp, Artificial Sequence
  source: /note="Description of Artificial Sequence: Synthetic light chain variable region CDR L2"
aaggtttctaaccgggactct

SEQ ID NO: 1375 - protein, 9 aa, Artificial Sequence
  source: /note="Description of Artificial Sequence: Synthetic light chain variable region CDR L3"
MQATDWPVT

SEQ ID NO: 1376 - DNA, 27 bp, Artificial Sequence
  source: /note="Description of Artificial Sequence: Synthetic light chain variable region CDR L3"
atgcaagctacagactggccggtcacg

SEQ ID NO: 1377 - DNA, 384 bp, Artificial Sequence
  source: /note="Description of Artificial Sequence: Synthetic heavy chain variable region"
caggtgcagctgcaggagtcgggcccaagactggtgaagccttcgcagaccctgtccctcacctgcactgtctctggtggctccatcagcagtggtgattattactggagttggatccgccagcccccagggaagggcctggagtggattgggtacatctattacagtgggagcacccactacaacccgtccctcaagagtcgagttagcatgtcagtagacacggccaagaaccagttctccctgaagctgacctctgtgactgccgcagacacggccgtctattactgtgccagagatatcggctacggtgaccacgggactgggtcttattactacggaatagaagactggggccaagggaccacggtcaccgtctcctca

SEQ ID NO: 1378 - protein, 128 aa, Artificial Sequence
  source: /note="Description of Artificial Sequence: Synthetic heavy chain variable region"
QVQLQESGPRLVKPSQTLSLTCTVSGGSISSGDYYWSWIRQPPGKGLEWIGYIYYSGSTHYNPSLKSRVSMSVDTAKNQFSLKLTSVTAADTAVYYCARDIGYGDHGTGSYYYGIEDWGQGTTVTVSS

SEQ ID NO: 1379 - protein, 11 aa, Artificial Sequence
  source: /note="Description of Artificial Sequence: Synthetic heavy chain variable region CDR H1"
GSISSGDYYWS

SEQ ID NO: 1380 - DNA, 33 bp, Artificial Sequence
  source: /note="Description of Artificial Sequence: Synthetic heavy chain variable region CDR H1"
ggctccatcagcagtggtgattattactggagt

SEQ ID NO: 1381 - protein, 16 aa, Artificial Sequence
  source: /note="Description of Artificial Sequence: Synthetic heavy chain variable region CDR H2"
YIYYSGSTHYNPSLKS

SEQ ID NO: 1382 - DNA, 48 bp, Artificial Sequence
  source: /note="Description of Artificial Sequence: Synthetic heavy chain variable region CDR H2"
tacatctattacagtgggagcacccactacaacccgtccctcaagagt

SEQ ID NO: 1383 - protein, 20 aa, Artificial Sequence
  source: /note="Description of Artificial Sequence: Synthetic heavy chain variable region CDR H3"
ARDIGYGDHGTGSYYYGIED

SEQ ID NO: 1384 - DNA, 60 bp, Artificial Sequence
  source: /note="Description of Artificial Sequence: Synthetic heavy chain variable region CDR H3"
gccagagatatcggctacggtgaccacgggactgggtcttattactacggaatagaagac

SEQ ID NO: 1385 - DNA, 318 bp, Artificial Sequence
  source: /note="Description of Artificial Sequence: Synthetic light chain variable region"
gatattgtgatgactcagactccagccaccctgtctttgtctccaggggacagagccaccctctcctgcagggccagtcagaatattatgagctacttagcctggtaccaacacaaacctggccagcctcccaggctcctcatctatgatgcatcctacagggccgctggcatcccagccaggttcagtggcagtgggtctgggacagacttcactctcaccatcagcagcctagagcctgaagattttgcagtttattactgtcagcagcgaaccaactggatcaccttcggccaagggacacgactggagattaaa

SEQ ID NO: 1386 - protein, 106 aa, Artificial Sequence
  source: /note="Description of Artificial Sequence: Synthetic light chain variable region"
DIVMTQTPATLSLSPGDRATLSCRASQNIMSYLAWYQHKPGQPPRLLIYDASYRAAGIPARFSGSGSGTDFTLTISSLEPEDFAVYYCQQRTNWITFGQGTRLEIK

SEQ ID NO: 1387 - protein, 11 aa, Artificial Sequence
  source: /note="Description of Artificial Sequence: Synthetic light chain variable region CDR L1"
RASQNIMSYLA

SEQ ID NO: 1388 - DNA, 33 bp, Artificial Sequence
  source: /note="Description of Artificial Sequence: Synthetic light chain variable region CDR L1"
agggccagtcagaatattatgagctacttagcc

SEQ ID NO: 1389 - protein, 7 aa, Artificial Sequence
  source: /note="Description of Artificial Sequence: Synthetic light chain variable region CDR L2"
DASYRAA

SEQ ID NO: 1390 - DNA, 21 bp, Artificial Sequence
  source: /note="Description of Artificial Sequence: Synthetic light chain variable region CDR L2"
gatgcatcctacagggccgct

SEQ ID NO: 1391 - protein, 8 aa, Artificial Sequence
  source: /note="Description of Artificial Sequence: Synthetic light chain variable region CDR L3"
QQRTNWIT

SEQ ID NO: 1392 - DNA, 24 bp, Artificial Sequence
  source: /note="Description of Artificial Sequence: Synthetic light chain variable region CDR L3"
cagcagcgaaccaactggatcacc

SEQ ID NO: 1393 - DNA, 369 bp, Artificial Sequence
  source: /note="Description of Artificial Sequence: Synthetic heavy chain variable region"
gaggtgcagctggtggagtcagggggaggcttggtgcagcggggggggtccctgagactctcgtgtgcggcctctggattcacctttagtggtaatgccatgagctgggtccgccaggctccagggaaggggctggagtgggtcgcatctattggtgaaagtgctactagcgcatactacgcagactccgtgaagggccggttcaccatctccagagatgattcgaagaacactctgtatctccaaatgaacagcctgagacccgaggacacggccgtatatttctgtgcgaaagatcgcgtaggatggttcggggagttcgacgcttttgatttctggggccaagggacaatggtcaccgtctcttca

SEQ ID NO: 1394 - protein, 123 aa, Artificial Sequence
  source: /note="Description of Artificial Sequence: Synthetic heavy chain variable region"
EVQLVESGGGLVQRGGSLRLSCAASGFTFSGNAMSWVRQAPGKGLEWVASIGESATSAYYADSVKGRFTISRDDSKNTLYLQMNSLRPEDTAVYFCAKDRVGWFGEFDAFDFWGQGTMVTVSS

SEQ ID NO: 1395 - protein, 9 aa, Artificial Sequence
  source: /note="Description of Artificial Sequence: Synthetic heavy chain variable region CDR H1"
FTFSGNAMS

SEQ ID NO: 1396 - DNA, 27 bp, Artificial Sequence
  source: /note="Description of Artificial Sequence: Synthetic heavy chain variable region CDR H1"
ttcacctttagtggtaatgccatgagc

SEQ ID NO: 1397 - protein, 17 aa, Artificial Sequence
  source: /note="Description of Artificial Sequence: Synthetic heavy chain variable region CDR H2"
SIGESATSAYYADSVKG

SEQ ID NO: 1398 - DNA, 51 bp, Artificial Sequence
  source: /note="Description of Artificial Sequence: Synthetic heavy chain variable region CDR H2"
tctattggtgaaagtgctactagcgcatactacgcagactccgtgaagggc

SEQ ID NO: 1399 - protein, 16 aa, Artificial Sequence
  source: /note="Description of Artificial Sequence: Synthetic heavy chain variable region CDR H3"
AKDRVGWFGEFDAFDF

SEQ ID NO: 1400 - DNA, 48 bp, Artificial Sequence
  source: /note="Description of Artificial Sequence: Synthetic heavy chain variable region CDR H3"
gcgaaagatcgcgtaggatggttcggggagttcgacgcttttgatttc

SEQ ID NO: 1401 - DNA, 324 bp, Artificial Sequence
  source: /note="Description of Artificial Sequence: Synthetic light chain variable region"
tcctatgagctgacgcagccaccctcagtgtcagtggccccaggaaagacggccaccatttcctgtgggggaaacaacattggaggtcacaaagtgcactggtaccagcagaggccaggccaggcccctgtcttggtcatctattatgataacgtccggccctcagggatccctgagcgattctctggctccaactctggaaacacggccaccctgaccatcagcagggtcgaggccggggatgaggccgacttttactgtcaggtgtgggatagtcgttctgaacatgtcatattcggcggggggaccaaggtcaccgtccta

SEQ ID NO: 1402 - protein, 108 aa, Artificial Sequence
  source: /note="Description of Artificial Sequence: Synthetic light chain variable region"
SYELTQPPSVSVAPGKTATISCGGNNIGGHKVHWYQQRPGQAPVLVIYYDNVRPSGIPERFSGSNSGNTATLTISRVEAGDEADFYCQVWDSRSEHVIFGGGTKVTVL

SEQ ID NO: 1403 - protein, 11 aa, Artificial Sequence
  source: /note="Description of Artificial Sequence: Synthetic light chain variable region CDR L1"
GGNNIGGHKVH

SEQ ID NO: 1404 - DNA, 33 bp, Artificial Sequence
  source: /note="Description of Artificial Sequence: Synthetic light chain variable region CDR L1"
gggggaaacaacattggaggtcacaaagtgcac

SEQ ID NO: 1405 - protein, 7 aa, Artificial Sequence
  source: /note="Description of Artificial Sequence: Synthetic light chain variable region CDR L2"
YDNVRPS

SEQ ID NO: 1406 - DNA, 21 bp, Artificial Sequence
  source: /note="Description of Artificial Sequence: Synthetic light chain variable region CDR L2"
tatgataacgtccggccctca

SEQ ID NO: 1407 - protein, 11 aa, Artificial Sequence
  source: /note="Description of Artificial Sequence: Synthetic light chain variable region CDR L3"
QVWDSRSEHVI

SEQ ID NO: 1408 - DNA, 33 bp, Artificial Sequence
  source: /note="Description of Artificial Sequence: Synthetic light chain variable region CDR L3"
caggtgtgggatagtcgttctgaacatgtcata

SEQ ID NO: 1409 - DNA, 363 bp, Artificial Sequence
  source: /note="Description of Artificial Sequence: Synthetic heavy chain variable region"
caggtccagcttgtacagtctggagctgaggtgaagaagcctggggcctcagtgaaggtctcgtgcaagacttctggttacaccttttccaactacggtatcagctggctgcgacaggcccctggacaagggcttgagtggatggcatggatcagcccttataatgggaacacaaagtctgcacagaggtttcagggcagagtcatcatgaccacagacacatccacgaggacagcccacatggaggtgaagagcctgagaactgacgacacggccacatattactgtgcgagagatccagcagtcgatgcaataccgatgcttgactactggggccagggaaccctggtcaccgtctcctca

SEQ ID NO: 1410 - protein, 121 aa, Artificial Sequence
  source: /note="Description of Artificial Sequence: Synthetic heavy chain variable region"
QVQLVQSGAEVKKPGASVKVSCKTSGYTFSNYGISWLRQAPGQGLEWMAWISPYNGNTKSAQRFQGRVIMTTDTSTRTAHMEVKSLRTDDTATYYCARDPAVDAIPMLDYWGQGTLVTVSS

SEQ ID NO: 1411 - protein, 9 aa, Artificial Sequence
  source: /note="Description of Artificial Sequence: Synthetic heavy chain variable region CDR H1"
YTFSNYGIS

SEQ ID NO: 1412 - DNA, 27 bp, Artificial Sequence
  source: /note="Description of Artificial Sequence: Synthetic heavy chain variable region CDR H1"
tacaccttttccaactacggtatcagc

SEQ ID NO: 1413 - protein, 17 aa, Artificial Sequence
  source: /note="Description of Artificial Sequence: Synthetic heavy chain variable region CDR H2"
WISPYNGNTKSAQRFQG

SEQ ID NO: 1414 - DNA, 51 bp, Artificial Sequence; identical to SEQ ID NO: 1046
  source: /note="Description of Artificial Sequence: Synthetic heavy chain variable region CDR H2"

SEQ ID NO: 1415 - protein, 14 aa, Artificial Sequence
  source: /note="Description of Artificial Sequence: Synthetic heavy chain variable region CDR H3"
ARDPAVDAIPMLDY

SEQ ID NO: 1416 - DNA, 42 bp, Artificial Sequence; identical to SEQ ID NO: 1048
  source: /note="Description of Artificial Sequence: Synthetic heavy chain variable region CDR H3"

SEQ ID NO: 1417 - DNA, 336 bp, Artificial Sequence
  source: /note="Description of Artificial Sequence: Synthetic light chain variable region"
gacatccagatgacccagtctccactctccctgcccgtcacccttggacagccggcctccatctcctgcaggtctagtcaaagcctcgtgtacactgatggaaacacctacttgagctggtttcagcagaggccaggccaatctccaaggcgcctaatttatagggtttctcaccgggactctggggtcccagacagattcaccggcagtgggtcaggcactgatttcacactgataatccgcagggtggaggctgaggatgttggggtttattactgcatgcaaggtacacactggcctctcactttcggcggagggaccaagctggagatcaaa

SEQ ID NO: 1418 - protein, 112 aa, Artificial Sequence
  source: /note="Description of Artificial Sequence: Synthetic light chain variable region"
DIQMTQSPLSLPVTLGQPASISCRSSQSLVYTDGNTYLSWFQQRPGQSPRRLIYRVSHRDSGVPDRFTGSGSGTDFTLIIRRVEAEDVGVYYCMQGTHWPLTFGGGTKLEIK

SEQ ID NO: 1419 - protein, 16 aa, Artificial Sequence
  source: /note="Description of Artificial Sequence: Synthetic light chain variable region CDR L1"
RSSQSLVYTDGNTYLS

SEQ ID NO: 1420 - DNA, 48 bp, Artificial Sequence; identical to SEQ ID NO: 1052
  source: /note="Description of Artificial Sequence: Synthetic light chain variable region CDR L1"

SEQ ID NO: 1421 - protein, 7 aa, Artificial Sequence
  source: /note="Description of Artificial Sequence: Synthetic light chain variable region CDR L2"
RVSHRDS

SEQ ID NO: 1422 - DNA, 21 bp, Artificial Sequence
  source: /note="Description of Artificial Sequence: Synthetic light chain variable region CDR L2"
agggtttctcaccgggactct

SEQ ID NO: 1423 - protein, 9 aa, Artificial Sequence
  source: /note="Description of Artificial Sequence: Synthetic light chain variable region CDR L3"
MQGTHWPLT

SEQ ID NO: 1424 - DNA, 27 bp, Artificial Sequence
  source: /note="Description of Artificial Sequence: Synthetic light chain variable region CDR L3"
atgcaaggtacacactggcctctcact

SEQ ID NO: 1425 - DNA, 378 bp, Artificial Sequence
  source: /note="Description of Artificial Sequence: Synthetic heavy chain variable region"
caggtccagctggtacagtctggtcctgcgctggtgaaacccacacagaccctcacactgacctgcaccttcggtggattctcactcagcagacatggaatgcgtgtgacctggatccgtcaggcccccgggaaggccctggagtggcttggtcacattgattgggatgatgataaattctacaggacatctctgaagaccaggctcaccatctccaaggacccctctaacaatgaggtggtcctgaaaatgaccaacatggaccacgtggacacagccacgtattactgtgcactgatgaggcccttttggagtcgtgacgactactactattccatcgccgtctggggcaaagggaccacggtcaccgtctcctca

SEQ ID NO: 1426 - protein, 126 aa, Artificial Sequence
  source: /note="Description of Artificial Sequence: Synthetic heavy chain variable region"
QVQLVQSGPALVKPTQTLTLTCTFGGFSLSRHGMRVTWIRQAPGKALEWLGHIDWDDDKFYRTSLKTRLTISKDPSNNEVVLKMTNMDHVDTATYYCALMRPFWSRDDYYYSIAVWGKGTTVTVSS

SEQ ID NO: 1427 - protein, 11 aa, Artificial Sequence
  source: /note="Description of Artificial Sequence: Synthetic heavy chain variable region CDR H1"
FSLSRHGMRVT

SEQ ID NO: 1428 - DNA, 33 bp, Artificial Sequence
  source: /note="Description of Artificial Sequence: Synthetic heavy chain variable region CDR H1"
ttctcactcagcagacatggaatgcgtgtgacc

SEQ ID NO: 1429 - protein, 16 aa, Artificial Sequence
  source: /note="Description of Artificial Sequence: Synthetic heavy chain variable region CDR H2"
HIDWDDDKFYRTSLKT

SEQ ID NO: 1430 - DNA, 48 bp, Artificial Sequence
  source: /note="Description of Artificial Sequence: Synthetic heavy chain variable region CDR H2"
cacattgattgggatgatgataaattctacaggacatctctgaagacc

SEQ ID NO: 1431 - protein, 18 aa, Artificial Sequence
  source: /note="Description of Artificial Sequence: Synthetic heavy chain variable region CDR H3"
ALMRPFWSRDDYYYSIAV

SEQ ID NO: 1432 - DNA, 54 bp, Artificial Sequence
  source: /note="Description of Artificial Sequence: Synthetic heavy chain variable region CDR H3"
gcactgatgaggcccttttggagtcgtgacgactactactattccatcgccgtc

SEQ ID NO: 1433 - DNA, 345 bp, Artificial Sequence
  source: /note="Description of Artificial Sequence: Synthetic light chain variable region"
gatattgtgctgacccagtctccaggcaccctgtctttgtctccaggggacagagccaccctctcctgcagggccagtcagagtgtcggcagcggctacgtaacctggtaccagcagaaacctggccaggctcccaggctcctcatttatggtgcatcaaacagggccgaaggcatcccagacaggttcagtggcagtgggtctgggacagacttcactctcaccatcagcggactggagtctgaagattttgtaatttattactgtcagctatatcataggtcacctggctctgcgagtcaaaccgtttggacgttcggccaagggaccaaggtggaaatcaaa

SEQ ID NO: 1434 - protein, 115 aa, Artificial Sequence
  source: /note="Description of Artificial Sequence: Synthetic light chain variable region"
DIVLTQSPGTLSLSPGDRATLSCRASQSVGSGYVTWYQQKPGQAPRLLIYGASNRAEGIPDRFSGSGSGTDFTLTISGLESEDFVIYYCQLYHRSPGSASQTVWTFGQGTKVEIK

SEQ ID NO: 1435 - protein, 12 aa, Artificial Sequence
  source: /note="Description of Artificial Sequence: Synthetic light chain variable region CDR L1"
RASQSVGSGYVT

SEQ ID NO: 1436 - DNA, 36 bp, Artificial Sequence
  source: /note="Description of Artificial Sequence: Synthetic light chain variable region CDR L1"
agggccagtcagagtgtcggcagcggctacgtaacc

SEQ ID NO: 1437 - protein, 7 aa, Artificial Sequence
  source: /note="Description of Artificial Sequence: Synthetic light chain variable region CDR L2"
GASNRAE

SEQ ID NO: 1438 - DNA, 21 bp, Artificial Sequence
  source: /note="Description of Artificial Sequence: Synthetic light chain variable region CDR L2"
ggtgcatcaaacagggccgaa

SEQ ID NO: 1439 - protein, 16 aa, Artificial Sequence
  source: /note="Description of Artificial Sequence: Synthetic light chain variable region CDR L3"
QLYHRSPGSASQTVWT

SEQ ID NO: 1440 - DNA, 48 bp, Artificial Sequence
  source: /note="Description of Artificial Sequence: Synthetic light chain variable region CDR L3"
cagctatatcataggtcacctggctctgcgagtcaaaccgtttggacg

SEQ ID NO: 1441 - DNA, 363 bp, Artificial Sequence
  source: /note="Description of Artificial Sequence: Synthetic heavy chain variable region"
caggtccagcttgtacagtctggacctgaggtgaagaagcctggggcctcagtgagggtctcctgcgaggcttctggttacccctttagcaattacggcatcacctgggtgcgccaggcccctggacaagggcttgagtggatgggatggatcagcgcttacaacggaaacagagactatctgcagaagtttcagggcagactcaccatgaccatagacacatccacgagaacagcccacatggaattgaggcgcctgacatctgacgacacggccgtatattggtgtgcgagagacacacccgccactgctgcccctctgcttgactactggggccagggaaccctggtcaccgtctcctca

SEQ ID NO: 1442 - protein, 121 aa, Artificial Sequence
  source: /note="Description of Artificial Sequence: Synthetic heavy chain variable region"
QVQLVQSGPEVKKPGASVRVSCEASGYPFSNYGITWVRQAPGQGLEWMGWISAYNGNRDYLQKFQGRLTMTIDTSTRTAHMELRRLTSDDTAVYWCARDTPATAAPLLDYWGQGTLVTVSS

SEQ ID NO: 1443 - protein, 9 aa, Artificial Sequence
  source: /note="Description of Artificial Sequence: Synthetic heavy chain variable region CDR H1"
YPFSNYGIT

SEQ ID NO: 1444 - DNA, 27 bp, Artificial Sequence
  source: /note="Description of Artificial Sequence: Synthetic heavy chain variable region CDR H1"
tacccctttagcaattacggcatcacc

SEQ ID NO: 1445 - protein, 17 aa, Artificial Sequence
  source: /note="Description of Artificial Sequence: Synthetic heavy chain variable region CDR H2"
WISAYNGNRDYLQKFQG

SEQ ID NO: 1446 - DNA, 51 bp, Artificial Sequence
  source: /note="Description of Artificial Sequence: Synthetic heavy chain variable region CDR H2"
tggatcagcgcttacaacggaaacagagactatctgcagaagtttcagggc

SEQ ID NO: 1447 - protein, 14 aa, Artificial Sequence
  source: /note="Description of Artificial Sequence: Synthetic heavy chain variable region CDR H3"
ARDTPATAAPLLDY

SEQ ID NO: 1448 - DNA, 42 bp, Artificial Sequence
  source: /note="Description of Artificial Sequence: Synthetic heavy chain variable region CDR H3"
gcgagagacacacccgccactgctgcccctctgcttgactac

SEQ ID NO: 1449 - DNA, 336 bp, Artificial Sequence
  source: /note="Description of Artificial Sequence: Synthetic light chain variable region"
gatattgtgatgactcagtctccactctccctggccgtcacccttggacagccggcctccatctcctgcaggtctagtcaaagcctcgaattcactgatggaaacacctacttgaattggtttcagcagaggccaggccaatctccaaggcgcctaatttataaggtttctaaccgggactctggggtcccagacagattcagcggcagtgggtcaggcactggtttcacactgaaaatcagcagggtggaggctgaggatgttggggtttattactgcatgcaaggtattttccggccggggacgttcggccaagggaccaaggtggaaatcaaa

SEQ ID NO: 1450 - protein, 112 aa, Artificial Sequence
  source: /note="Description of Artificial Sequence: Synthetic light chain variable region"
DIVMTQSPLSLAVTLGQPASISCRSSQSLEFTDGNTYLNWFQQRPGQSPRRLIYKVSNRDSGVPDRFSGSGSGTGFTLKISRVEAEDVGVYYCMQGIFRPGTFGQGTKVEIK

SEQ ID NO: 1451 - protein, 16 aa, Artificial Sequence
  source: /note="Description of Artificial Sequence: Synthetic light chain variable region CDR L1"
RSSQSLEFTDGNTYLN

SEQ ID NO: 1452 - DNA, 48 bp, Artificial Sequence
  source: /note="Description of Artificial Sequence: Synthetic light chain variable region CDR L1"
aggtctagtcaaagcctcgaattcactgatggaaacacctacttgaat

SEQ ID NO: 1453 - protein, 7 aa, Artificial Sequence
  source: /note="Description of Artificial Sequence: Synthetic light chain variable region CDR L2"
KVSNRDS

SEQ ID NO: 1454 - DNA, 21 bp, Artificial Sequence
  source: /note="Description of Artificial Sequence: Synthetic light chain variable region CDR L2"
aaggtttctaaccgggactct

SEQ ID NO: 1455 - protein, 9 aa, Artificial Sequence
  source: /note="Description of Artificial Sequence: Synthetic light chain variable region CDR L3"
MQGIFRPGT

SEQ ID NO: 1456 - DNA, 27 bp, Artificial Sequence
  source: /note="Description of Artificial Sequence: Synthetic light chain variable region CDR L3"
atgcaaggtattttccggccggggacg

SEQ ID NO: 1457 - DNA, 363 bp, Artificial Sequence
  source: /note="Description of Artificial Sequence: Synthetic heavy chain variable region"
caggtccagctggtgcagtctggagctgaggtgaagaagcctggggcctcagtgaaggtctcctgcaaggcttctggttacacctttgtccactatggtatcagttgggtgcgacaggcccctggacaagggcttgagtggatgggatggatcagcgcatacaatggtaatacaaactctgcactgaagttccaggacagagtcaccatgaccacagacccatccacgagcacagcctacatggagctgaggagcctgagatctgacgacacggccatttattactgtgcgagagactcaggttgttgtagtggttccacctcagacgtctggggcaaagggaccacggtcaccgtctcctca

SEQ ID NO: 1458 - protein, 121 aa, Artificial Sequence
  source: /note="Description of Artificial Sequence: Synthetic heavy chain variable region"
QVQLVQSGAEVKKPGASVKVSCKASGYTFVHYGISWVRQAPGQGLEWMGWISAYNGNTNSALKFQDRVTMTTDPSTSTAYMELRSLRSDDTAIYYCARDSGCCSGSTSDVWGKGTTVTVSS

SEQ ID NO: 1459 - protein, 9 aa, Artificial Sequence
  source: /note="Description of Artificial Sequence: Synthetic heavy chain variable region CDR H1"
YTFVHYGIS

SEQ ID NO: 1460 - DNA, 27 bp, Artificial Sequence
  source: /note="Description of Artificial Sequence: Synthetic heavy chain variable region CDR H1"
tacacctttgtccactatggtatcagt

SEQ ID NO: 1461 - protein, 17 aa, Artificial Sequence
  source: /note="Description of Artificial Sequence: Synthetic heavy chain variable region CDR H2"
WISAYNGNTNSALKFQD

SEQ ID NO: 1462 - DNA, 51 bp, Artificial Sequence
  source: /note="Description of Artificial Sequence: Synthetic heavy chain variable region CDR H2"
tggatcagcgcatacaatggtaatacaaactctgcactgaagttccaggac

SEQ ID NO: 1463 - protein, 14 aa, Artificial Sequence
  source: /note="Description of Artificial Sequence: Synthetic heavy chain variable region CDR H3"
ARDSGCCSGSTSDV

SEQ ID NO: 1464 - DNA, 42 bp, Artificial Sequence
  source: /note="Description of Artificial Sequence: Synthetic heavy chain variable region CDR H3"
gcgagagactcaggttgttgtagtggttccacctcagacgtc

SEQ ID NO: 1465 - DNA, 342 bp, Artificial Sequence
  source: /note="Description of Artificial Sequence: Synthetic light chain variable region"
gatattgtgatgactcagtctccactctcttcacctgtcacccttggacagccggcctccatctcctgcaggtctagtcaaagcctcgtgcacagtgatggaaacacctacttgagttggcttcaccagaggccaggccagcctccaagactcctaatttataagatttcccaccggttctctggggtcccagacagattcactggcagtggggcagggacagatttcacactgaaaatcagcagggtggaggctgaggatgtcggggtttattactgcatgcaagctacagaatttcctccgatgtacacttttggccaggggaccaaggtggagatcaaa

SEQ ID NO: 1466 - protein, 114 aa, Artificial Sequence
  source: /note="Description of Artificial Sequence: Synthetic light chain variable region"
DIVMTQSPLSSPVTLGQPASISCRSSQSLVHSDGNTYLSWLHQRPGQPPRLLIYKISHRFSGVPDRFTGSGAGTDFTLKISRVEAEDVGVYYCMQATEFPPMYTFGQGTKVEIK

SEQ ID NO: 1467 - protein, 16 aa, Artificial Sequence
  source: /note="Description of Artificial Sequence: Synthetic light chain variable region CDR L1"
RSSQSLVHSDGNTYLS

SEQ ID NO: 1468 - DNA, 48 bp, Artificial Sequence
  source: /note="Description of Artificial Sequence: Synthetic light chain variable region CDR L1"
aggtctagtcaaagcctcgtgcacagtgatggaaacacctacttgagt

SEQ ID NO: 1469 - protein, 7 aa, Artificial Sequence
  source: /note="Description of Artificial Sequence: Synthetic light chain variable region CDR L2"
KISHRFS

SEQ ID NO: 1470 - DNA, 21 bp, Artificial Sequence
  source: /note="Description of Artificial Sequence: Synthetic light chain variable region CDR L2"
aagatttcccaccggttctct

SEQ ID NO: 1471 - protein, 11 aa, Artificial Sequence
  source: /note="Description of Artificial Sequence: Synthetic light chain variable region CDR L3"
MQATEFPPMYT

SEQ ID NO: 1472 - DNA, 33 bp, Artificial Sequence
  source: /note="Description of Artificial Sequence: Synthetic light chain variable region CDR L3"
atgcaagctacagaatttcctccgatgtacact

SEQ ID NO: 1473 - DNA, 372 bp, Artificial Sequence
  source: /note="Description of Artificial Sequence: Synthetic heavy chain variable region"
gaggtgcagctggtggagacgggcccaggactggtgaagccttcggagaccctgtccctcacctgcactgtctctggtgactccatcagtggttactactggagctggatccggcagtccccagggaagggactggagtggattggctatatctattacagggggagcaccgactacaacccctccctcaagagtcgagtcaccatatcagtagacacgtccaagaaccagttctccctgaaactgagctctgtgaccgctgcggacacggccgtgtattactgtgcgagagataataaacaccatgattcgggaaattattacgcatactttgaccattggggccagggaaccctggtcaccgtctcctca

SEQ ID NO: 1474 - protein, 124 aa, Artificial Sequence
  source: /note="Description of Artificial Sequence: Synthetic heavy chain variable region"
EVQLVETGPGLVKPSETLSLTCTVSGDSISGYYWSWIRQSPGKGLEWIGYIYYRGSTDYNPSLKSRVTISVDTSKNQFSLKLSSVTAADTAVYYCARDNKHHDSGNYYAYFDHWGQGTLVTVSS

SEQ ID NO: 1475 - protein, 9 aa, Artificial Sequence
  source: /note="Description of Artificial Sequence: Synthetic heavy chain variable region CDR H1"
DSISGYYWS

SEQ ID NO: 1476 - DNA, 27 bp, Artificial Sequence
  source: /note="Description of Artificial Sequence: Synthetic heavy chain variable region CDR H1"
gactccatcagtggttactactggagc

SEQ ID NO: 1477 - protein, 16 aa, Artificial Sequence
  source: /note="Description of Artificial Sequence: Synthetic heavy chain variable region CDR H2"
YIYYRGSTDYNPSLKS

SEQ ID NO: 1478 - DNA, 48 bp, Artificial Sequence
  source: /note="Description of Artificial Sequence: Synthetic heavy chain variable region CDR H2"
tatatctattacagggggagcaccgactacaacccctccctcaagagt

SEQ ID NO: 1479 - protein, 18 aa, Artificial Sequence
  source: /note="Description of Artificial Sequence: Synthetic heavy chain variable region CDR H3"
ARDNKHHDSGNYYAYFDH

SEQ ID NO: 1480 - DNA, 54 bp, Artificial Sequence
  source: /note="Description of Artificial Sequence: Synthetic heavy chain variable region CDR H3"
gcgagagataataaacaccatgattcgggaaattattacgcatactttgaccat

SEQ ID NO: 1481 - DNA, 321 bp, Artificial Sequence
  source: /note="Description of Artificial Sequence: Synthetic light chain variable region"
gatattgtgatgactcagtctccatcctccctgtctgcatctgtaggagacagagtcaccatcacttgccgggcaagtcagaacattaacacctttttaaattggtatcagcacaaaccagggaaagcccctaaactcctgatctatggtgcatcccgtttgcagagtggggtcccatcaaggttcactggcagtggatctgggacagatttcactctcaccatcagcagtctgcaacctgaagattttgcaacttactcctgtcaacagagttacactacccggctcactttcggcggagggaccaaggtggaaatcaaa

SEQ ID NO: 1482 - protein, 107 aa, Artificial Sequence
  source: /note="Description of Artificial Sequence: Synthetic light chain variable region"
DIVMTQSPSSLSASVGDRVTITCRASQNINTFLNWYQHKPGKAPKLLIYGASRLQSGVPSRFTGSGSGTDFTLTISSLQPEDFATYSCQQSYTTRLTFGGGTKVEIK

SEQ ID NO: 1483 - protein, 11 aa, Artificial Sequence
  source: /note="Description of Artificial Sequence: Synthetic light chain variable region CDR L1"
RASQNINTFLN

SEQ ID NO: 1484 - DNA, 33 bp, Artificial Sequence
  source: /note="Description of Artificial Sequence: Synthetic light chain variable region CDR L1"
cgggcaagtcagaacattaacacctttttaaat

SEQ ID NO: 1485 - protein, 7 aa, Artificial Sequence
  source: /note="Description of Artificial Sequence: Synthetic light chain variable region CDR L2"
GASRLQS

SEQ ID NO: 1486 - DNA, 21 bp, Artificial Sequence
  source: /note="Description of Artificial Sequence: Synthetic light chain variable region CDR L2"
ggtgcatcccgtttgcagagt

SEQ ID NO: 1487 - protein, 9 aa, Artificial Sequence
  source: /note="Description of Artificial Sequence: Synthetic light chain variable region CDR L3"
QQSYTTRLT

SEQ ID NO: 1488 - DNA, 27 bp, Artificial Sequence
  source: /note="Description of Artificial Sequence: Synthetic light chain variable region CDR L3"
caacagagttacactacccggctcact

SEQ ID NO: 1489 - DNA, 375 bp, Artificial Sequence
  source: /note="Description of Artificial Sequence: Synthetic heavy chain variable region"
caggtccagctggtgcagtctgggactgaggtgaagaagcctggggcctcagtgaagatttcctgcaagacttctggatacaccttcactaataatgtaattcaatgggtgcgccaggcccccggacaaaggcttgagtggatgggatggatcagcgctggcaatggttacacaaaatattcagacaagttccaggacagagtcaccattaccagggacacatccgcgagcacagcctacatggaggtgagcagcctgacatctgaagacacggctatgtattactgtgcgagacaagtctcgactagtggctggcacgcaacgtcacaccggttcgccccctggggccagggaaccctggtcaccgtctcctca

SEQ ID NO: 1490 - protein, 125 aa, Artificial Sequence
  source: /note="Description of Artificial Sequence: Synthetic heavy chain variable region"
QVQLVQSGTEVKKPGASVKISCKTSGYTFTNNVIQWVRQAPGQRLEWMGWISAGNGYTKYSDKFQDRVTITRDTSASTAYMEVSSLTSEDTAMYYCARQVSTSGWHATSHRFAPWGQGTLVTVSS

SEQ ID NO: 1491 - protein, 9 aa, Artificial Sequence
  source: /note="Description of Artificial Sequence: Synthetic heavy chain variable region CDR H1"
YTFTNNVIQ

SEQ ID NO: 1492 - DNA, 27 bp, Artificial Sequence
  source: /note="Description of Artificial Sequence: Synthetic heavy chain variable region CDR H1"
tacaccttcactaataatgtaattcaa

SEQ ID NO: 1493 - protein, 17 aa, Artificial Sequence
  source: /note="Description of Artificial Sequence: Synthetic heavy chain variable region CDR H2"
WISAGNGYTKYSDKFQD

SEQ ID NO: 1494 - DNA, 51 bp, Artificial Sequence
  source: /note="Description of Artificial Sequence: Synthetic heavy chain variable region CDR H2"
tggatcagcgctggcaatggttacacaaaatattcagacaagttccaggac

SEQ ID NO: 1495 - protein, 18 aa, Artificial Sequence
  source: /note="Description of Artificial Sequence: Synthetic heavy chain variable region CDR H3"
ARQVSTSGWHATSHRFAP

SEQ ID NO: 1496 - DNA, 54 bp, Artificial Sequence
  source: /note="Description of Artificial Sequence: Synthetic heavy chain variable region CDR H3"
gcgagacaagtctcgactagtggctggcacgcaacgtcacaccggttcgccccc

SEQ ID NO: 1497 - DNA, 321 bp, Artificial Sequence
  source: /note="Description of Artificial Sequence: Synthetic light chain variable region"
gacatccagatgacccagtctccatcctccctgtctgcatctgtaggagacagagtcaccatcacttgccaggcgagtcagggcattagtagatatttaaattggtatcagcagaaaccagggaaagcccctaacctcctgatctacgatgcatccaatttggaaacaggggtcccatcaaggttcagtggaagtggatctgggacacattttactttaaccatcagcagcctgcagcctgaagatattgcaacatattactgtcaacagtatgataatctcccgctcactttcggcggagggaccaaggtggaaatcaaa

SEQ ID NO: 1498 - protein, 107 aa, Artificial Sequence
  source: /note="Description of Artificial Sequence: Synthetic light chain variable region"
DIQMTQSPSSLSASVGDRVTITCQASQGISRYLNWYQQKPGKAPNLLIYDASNLETGVPSRFSGSGSGTHFTLTISSLQPEDIATYYCQQYDNLPLTFGGGTKVEIK

SEQ ID NO: 1499 - protein, 11 aa, Artificial Sequence
  source: /note="Description of Artificial Sequence: Synthetic light chain variable region CDR L1"
QASQGISRYLN

SEQ ID NO: 1500 - DNA, 33 bp, Artificial Sequence
  source: /note="Description of Artificial Sequence: Synthetic light chain variable region CDR L1"
caggcgagtcagggcattagtagatatttaaat

SEQ ID NO: 1501 - protein, 7 aa, Artificial Sequence
  source: /note="Description of Artificial Sequence: Synthetic light chain variable region CDR L2"
DASNLET

SEQ ID NO: 1502 - DNA, 21 bp, Artificial Sequence
  source: /note="Description of Artificial Sequence: Synthetic light chain variable region CDR L2"
gatgcatccaatttggaaaca

SEQ ID NO: 1503 - protein, 9 aa, Artificial Sequence
  source: /note="Description of Artificial Sequence: Synthetic light chain variable region CDR L3"
QQYDNLPLT

SEQ ID NO: 1504 - DNA, 27 bp, Artificial Sequence
  source: /note="Description of Artificial Sequence: Synthetic light chain variable region CDR L3"
caacagtatgataatctcccgctcact

SEQ ID NO: 1505 - DNA, 363 bp, Artificial Sequence
  source: /note="Description of Artificial Sequence: Synthetic heavy chain variable region"
gaggtgcagctggtggagtctgggggaggcgtggtccagcctgggaggtccctgagactctcctgtgaagcctctggattcaccttcagtagttttagcatgcactgggtccgccaggctccgggcaaggggctggagtgggtggcagtgattttatatgatgggagtaatcaatactatgcagactccgtgaagggccgattcaccatctccagagacaattccaagaacacgctttatctgcaaatgaacaccctgagagctgaggacacggctatgtattactgtgcgaaatcatcatcgtcccatgttaactctcgacaagacaaatggggccagggcaccctggtcaccgtctcctca

SEQ ID NO: 1506 - protein, 121 aa, Artificial Sequence
  source: /note="Description of Artificial Sequence: Synthetic heavy chain variable region"
EVQLVESGGGVVQPGRSLRLSCEASGFTFSSFSMHWVRQAPGKGLEWVAVILYDGSNQYYADSVKGRFTISRDNSKNTLYLQMNTLRAEDTAMYYCAKSSSSHVNSRQDKWGQGTLVTVSS

SEQ ID NO: 1507 - protein, 9 aa, Artificial Sequence
  source: /note="Description of Artificial Sequence: Synthetic heavy chain variable region CDR H1"
FTFSSFSMH

SEQ ID NO: 1508 - DNA, 27 bp, Artificial Sequence
  source: /note="Description of Artificial Sequence: Synthetic heavy chain variable region CDR H1"
ttcaccttcagtagttttagcatgcac

SEQ ID NO: 1509 - protein, 17 aa, Artificial Sequence
  source: /note="Description of Artificial Sequence: Synthetic heavy chain variable region CDR H2"
VILYDGSNQYYADSVKG

SEQ ID NO: 1510 - DNA, 51 bp, Artificial Sequence
  source: /note="Description of Artificial Sequence: Synthetic heavy chain variable region CDR H2"
gtgattttatatgatgggagtaatcaatactatgcagactccgtgaagggc

SEQ ID NO: 1511 - protein, 14 aa, Artificial Sequence
  source: /note="Description of Artificial Sequence: Synthetic heavy chain variable region CDR H3"
AKSSSSHVNSRQDK

SEQ ID NO: 1512 - DNA, 42 bp, Artificial Sequence
  source: /note="Description of Artificial Sequence: Synthetic heavy chain variable region CDR H3"
gcgaaatcatcatcgtcccatgttaactctcgacaagacaaa

SEQ ID NO: 1513 - DNA, 318 bp, Artificial Sequence
  source: /note="Description of Artificial Sequence: Synthetic light chain variable region"
gaaattgtattgacacagtctccttccaccctgtctgcatctgtaggagacagagtcaccatcacttgccgggccagtcagagtattagtaggtggttggcctggtatcagcagaaaccaggggaagcccctaaactcctgatccacacggcgtctacattagaaagtggggtcccatcaaggttcagcggcagtggctctgggacagaattcactctcaccatcaacagcctgcagcctgatgatcttgcaacttattactgccaacagtattataattggtggacgttcggccaagggaccaaggtggagatcaaa

SEQ ID NO: 1514 - protein, 106 aa, Artificial Sequence
  source: /note="Description of Artificial Sequence: Synthetic light chain variable region"
EIVLTQSPSTLSASVGDRVTITCRASQSISRWLAWYQQKPGEAPKLLIHTASTLESGVPSRFSGSGSGTEFTLTINSLQPDDLATYYCQQYYNWWTFGQGTKVEIK

SEQ ID NO: 1515 - protein, 11 aa, Artificial Sequence
  source: /note="Description of Artificial Sequence: Synthetic light chain variable region CDR L1"
RASQSISRWLA

SEQ ID NO: 1516 - DNA, 33 bp, Artificial Sequence
  source: /note="Description of Artificial Sequence: Synthetic light chain variable region CDR L1"
cgggccagtcagagtattagtaggtggttggcc

SEQ ID NO: 1517 - protein, 7 aa, Artificial Sequence
  source: /note="Description of Artificial Sequence: Synthetic light chain variable region CDR L2"
TASTLES

SEQ ID NO: 1518 - DNA, 21 bp, Artificial Sequence
  source: /note="Description of Artificial Sequence: Synthetic light chain variable region CDR L2"
acggcgtctacattagaaagt

SEQ ID NO: 1519 - protein, 8 aa, Artificial Sequence
  source: /note="Description of Artificial Sequence: Synthetic light chain variable region CDR L3"
QQYYNWWT

SEQ ID NO: 1520 - DNA, 24 bp, Artificial Sequence
  source: /note="Description of Artificial Sequence: Synthetic light chain variable region CDR L3"
caacagtattataattggtggacg

SEQ ID NO: 1521 - DNA, 366 bp, Artificial Sequence
  source: /note="Description of Artificial Sequence: Synthetic heavy chain variable region"
gaggtgcagctgttggagtccggagctgaggtgaagaagcctggggcctcagtgaagatctcctgcaaggcctctggttacatctttaccagttatggtgtcagttgggtgcgacaggcccctggacaagggcttaagtggatgggatggatcagcggttacaatggtaacacatactatgaccagaaattccagggcagagtcaccatgaccacagacacatccacgaacacagcctacatggagttgaggagcctgacatctgacgacacggccgtatattactgtgcgagagattccttttcagagactgggactggatttcctgacttctggggccagggcaccctggtcaccgtctcttca

SEQ ID NO: 1522 - protein, 122 aa, Artificial Sequence
  source: /note="Description of Artificial Sequence: Synthetic heavy chain variable region"
EVQLLESGAEVKKPGASVKISCKASGYIFTSYGVSWVRQAPGQGLKWMGWISGYNGNTYYDQKFQGRVTMTTDTSTNTAYMELRSLTSDDTAVYYCARDSFSETGTGFPDFWGQGTLVTVSS

SEQ ID NO: 1523 - protein, 9 aa, Artificial Sequence
  source: /note="Description of Artificial Sequence: Synthetic heavy chain variable region CDR H1"
YIFTSYGVS

SEQ ID NO: 1524 - DNA, 27 bp, Artificial Sequence
  source: /note="Description of Artificial Sequence: Synthetic heavy chain variable region CDR H1"
tacatctttaccagttatggtgtcagt

SEQ ID NO: 1525 - protein, 17 aa, Artificial Sequence
  source: /note="Description of Artificial Sequence: Synthetic heavy chain variable region CDR H2"
WISGYNGNTYYDQKFQG

SEQ ID NO: 1526 - DNA, 51 bp, Artificial Sequence
  source: /note="Description of Artificial Sequence: Synthetic heavy chain variable region CDR H2"
tggatcagcggttacaatggtaacacatactatgaccagaaattccagggc

SEQ ID NO: 1527 - protein, 15 aa, Artificial Sequence
  source: /note="Description of Artificial Sequence: Synthetic heavy chain variable region CDR H3"
ARDSFSETGTGFPDF

SEQ ID NO: 1528 - DNA, 45 bp, Artificial Sequence
  source: /note="Description of Artificial Sequence: Synthetic heavy chain variable region CDR H3"
gcgagagattccttttcagagactgggactggatttcctgacttc

SEQ ID NO: 1529 - DNA, 336 bp, Artificial Sequence
  source: /note="Description of Artificial Sequence: Synthetic light chain variable region"
gaaattgtgttgacgcagtctccactctccctgcccgtcacccttggacagccggcctccatctcctgcaggtctagtcaaagcctcgaatacagtgatggaaacacctacttgaattggtttcagcagaggccaggccaatctccaaggcgcctaatttataaggtttctaaccgggactctggggtccccgacagattcagcggcagtgggtcaggcactgatttcacactgaaaatcagcagggtggaggctgaggatgttggagtttattactgcatgcaagccacacaccggcctcgcacgttcggccaagggaccaaagtggatatcaaa

SEQ ID NO: 1530 - protein, 112 aa, Artificial Sequence
  source: /note="Description of Artificial Sequence: Synthetic light chain variable region"
EIVLTQSPLSLPVTLGQPASISCRSSQSLEYSDGNTYLNWFQQRPGQSPRRLIYKVSNRDSGVPDRFSGSGSGTDFTLKISRVEAEDVGVYYCMQATHRPRTFGQGTKVDIK

SEQ ID NO: 1531 - protein, 16 aa, Artificial Sequence
  source: /note="Description of Artificial Sequence: Synthetic light chain variable region CDR L1"
RSSQSLEYSDGNTYLN

SEQ ID NO: 1532 - DNA, 48 bp, Artificial Sequence
  source: /note="Description of Artificial Sequence: Synthetic light chain variable region CDR L1"
aggtctagtcaaagcctcgaatacagtgatggaaacacctacttgaat

SEQ ID NO: 1533 - protein, 7 aa, Artificial Sequence
  source: /note="Description of Artificial Sequence: Synthetic light chain variable region CDR L2"
KVSNRDS

SEQ ID NO: 1534 - DNA, 21 bp, Artificial Sequence
  source: /note="Description of Artificial Sequence: Synthetic light chain variable region CDR L2"
aaggtttctaaccgggactct

SEQ ID NO: 1535 - protein, 9 aa, Artificial Sequence
  source: /note="Description of Artificial Sequence: Synthetic light chain variable region CDR L3"
MQATHRPRT

SEQ ID NO: 1536 - DNA, 27 bp, Artificial Sequence
  source: /note="Description of Artificial Sequence: Synthetic light chain variable region CDR L3"
atgcaagccacacaccggcctcgcacg

SEQ ID NO: 1537 - DNA, 357 bp, Artificial Sequence
  source: /note="Description of Artificial Sequence: Synthetic heavy chain variable region"
caggtccagctggtgcagtctggagcagaggtgaaaaagcccggggagtctctgaagatctcctgtaagggttttggatacagctttaacagttactggatcgcctgggtgcgccagatgcccgggaaaggcctggagtgcatgggcatcatctatcctggcgactctgataccagatacagcccgtccttccaagggcaggtcaccatctcagtcgacaagtccatcactaccgcctacctgcagtggagcagcctgaaggtctcggacaccgccatgtattactgtgcgaaaagtaatgtggggaatacaggttggaactactggggccagggaaccctggtcaccgtctcctca

SEQ ID NO: 1538 - protein, 119 aa, Artificial Sequence
  source: /note="Description of Artificial Sequence: Synthetic heavy chain variable region"
QVQLVQSGAEVKKPGESLKISCKGFGYSFNSYWIAWVRQMPGKGLECMGIIYPGDSDTRYSPSFQGQVTISVDKSITTAYLQWSSLKVSDTAMYYCAKSNVGNTGWNYWGQGTLVTVSS

SEQ ID NO: 1539 - protein, 9 aa, Artificial Sequence
  source: /note="Description of Artificial Sequence: Synthetic heavy chain variable region CDR H1"
YSFNSYWIA

SEQ ID NO: 1540 - DNA, 27 bp, Artificial Sequence
  source: /note="Description of Artificial Sequence: Synthetic heavy chain variable region CDR H1"
tacagctttaacagttactggatcgcc

SEQ ID NO: 1541 - protein, 17 aa, Artificial Sequence
  source: /note="Description of Artificial Sequence: Synthetic heavy chain variable region CDR H2"
IIYPGDSDTRYSPSFQG

SEQ ID NO: 1542 - DNA, 51 bp, Artificial Sequence
  source: /note="Description of Artificial Sequence: Synthetic heavy chain variable region CDR H2"
atcatctatcctggcgactctgataccagatacagcccgtccttccaaggg

SEQ ID NO: 1543 - protein, 12 aa, Artificial Sequence
  source: /note="Description of Artificial Sequence: Synthetic heavy chain variable region CDR H3"
AKSNVGNTGWNY

SEQ ID NO: 1544 - DNA, 36 bp, Artificial Sequence
  source: /note="Description of Artificial Sequence: Synthetic heavy chain variable region CDR H3"
gcgaaaagtaatgtggggaatacaggttggaactac

SEQ ID NO: 1545 - DNA, 324 bp, Artificial Sequence
  source: /note="Description of Artificial Sequence: Synthetic light chain variable region"
gaaattgtattgacacagtctccagccaccctgtctttgtctccaggggaaagagccaccctctcctgcagggccagtcacagtgttgccaccgacctagcctggtaccagcagaaacctggccaggctcccaggctcctcatctatgatgcatccaagagggccactgacgtcccagccaggttcagtggcagtgggtctgggacagacttcactctcaccatcagcagcctagagcctgaagatgttgcagtttattactgtcaggaagttaggaactggcctccgtgcacttttggccaggggaccaaagtggatatcaaa

SEQ ID NO: 1546 - protein, 108 aa, Artificial Sequence
  source: /note="Description of Artificial Sequence: Synthetic light chain variable region"
EIVLTQSPATLSLSPGERATLSCRASHSVATDLAWYQQKPGQAPRLLIYDASKRATDVPARFSGSGSGTDFTLTISSLEPEDVAVYYCQEVRNWPPCTFGQGTKVDIK

SEQ ID NO: 1547 - protein, 11 aa, Artificial Sequence
  source: /note="Description of Artificial Sequence: Synthetic light chain variable region CDR L1"
RASHSVATDLA

SEQ ID NO: 1548 - DNA, 33 bp, Artificial Sequence
  source: /note="Description of Artificial Sequence: Synthetic light chain variable region CDR L1"
agggccagtcacagtgttgccaccgacctagcc

SEQ ID NO: 1549 - protein, 7 aa, Artificial Sequence
  source: /note="Description of Artificial Sequence: Synthetic light chain variable region CDR L2"
DASKRAT

SEQ ID NO: 1550 - DNA, 21 bp, Artificial Sequence
  source: /note="Description of Artificial Sequence: Synthetic light chain variable region CDR L2"
gatgcatccaagagggccact

SEQ ID NO: 1551 - protein, 10 aa, Artificial Sequence
  source: /note="Description of Artificial Sequence: Synthetic light chain variable region CDR L3"
QEVRNWPPCT

SEQ ID NO: 1552 - DNA, 30 bp, Artificial Sequence
  source: /note="Description of Artificial Sequence: Synthetic light chain variable region CDR L3"
caggaagttaggaactggcctccgtgcact

SEQ ID NO: 1553 - DNA, 369 bp, Artificial Sequence
  source: /note="Description of Artificial Sequence: Synthetic heavy chain variable region"
gaggtgcagctgcaggagtccggctctcgactggtgaagccttcacagaccctgtccctcacctgctctgtctctggtggctccctcaacgcaggcggttacctgtggagctggatccgtcagccaccagggaagggcctggagtgggttgggtacatctatcctagtgggactacctactacaacccgtccctgcagagtcgaatcagcatttcacaagacaggtccaggaaccagttctccctgagcgtagcgtctgtgaccgccgcggacacggccgtctattactgtgccagatgtgggaatgagtacggtgaggtccatccttttgatatttggggccaagggaccacggtcaccgtctcctca

SEQ ID NO: 1554 - protein, 123 aa, Artificial Sequence
  source: /note="Description of Artificial Sequence: Synthetic heavy chain variable region"
EVQLQESGSRLVKPSQTLSLTCSVSGGSLNAGGYLWSWIRQPPGKGLEWVGYIYPSGTTYYNPSLQSRISISQDRSRNQFSLSVASVTAADTAVYYCARCGNEYGEVHPFDIWGQGTTVTVSS

SEQ ID NO: 1555 - protein, 11 aa, Artificial Sequence
  source: /note="Description of Artificial Sequence: Synthetic heavy chain variable region CDR H1"
GSLNAGGYLWS

SEQ ID NO: 1556 - DNA, 33 bp, Artificial Sequence
  source: /note="Description of Artificial Sequence: Synthetic heavy chain variable region CDR H1"
ggctccctcaacgcaggcggttacctgtggagc

SEQ ID NO: 1557 - protein, 16 aa, Artificial Sequence
  source: /note="Description of Artificial Sequence: Synthetic heavy chain variable region CDR H2"
YIYPSGTTYYNPSLQS

SEQ ID NO: 1558 - DNA, 48 bp, Artificial Sequence
  source: /note="Description of Artificial Sequence: Synthetic heavy chain variable region CDR H2"
tacatctatcctagtgggactacctactacaacccgtccctgcagagt

SEQ ID NO: 1559 - protein, 15 aa, Artificial Sequence
  source: /note="Description of Artificial Sequence: Synthetic heavy chain variable region CDR H3"
ARCGNEYGEVHPFDI

SEQ ID NO: 1560 - DNA, 45 bp, Artificial Sequence
  source: /note="Description of Artificial Sequence: Synthetic heavy chain variable region CDR H3"
gccagatgtgggaatgagtacggtgaggtccatccttttgatatt

SEQ ID NO: 1561 - DNA, 324 bp, Artificial Sequence
  source: /note="Description of Artificial Sequence: Synthetic light chain variable region"
gaaattgtattgacacagtctccaggcaccctgtctttgtctccaggggaaagagccaccctctcctgccggggcagtcctattgttggcaacaactacttagcctggtaccagcagaagcctggccaggctcccaggctcctcatctatgctgcatccatcagggccactggcatcccagacaggttcagtggcagtgggtctgggacagacttcactctcaccatcagcagactagagcctgaagattttgcagtctattactgtcagcaatatggcagctcaccgtggacgttcggccaagggaccaaagtggatatcaaa

SEQ ID NO: 1562 - protein, 108 aa, Artificial Sequence
  source: /note="Description of Artificial Sequence: Synthetic light chain variable region"
EIVLTQSPGTLSLSPGERATLSCRGSPIVGNNYLAWYQQKPGQAPRLLIYAASIRATGIPDRFSGSGSGTDFTLTISRLEPEDFAVYYCQQYGSSPWTFGQGTKVDIK

SEQ ID NO: 1563 - protein, 12 aa, Artificial Sequence
  source: /note="Description of Artificial Sequence: Synthetic light chain variable region CDR L1"
RGSPIVGNNYLA

SEQ ID NO: 1564 - DNA, 36 bp, Artificial Sequence
  source: /note="Description of Artificial Sequence: Synthetic light chain variable region CDR L1"
cggggcagtcctattgttggcaacaactacttagcc

SEQ ID NO: 1565 - protein, 7 aa, Artificial Sequence
  source: /note="Description of Artificial Sequence: Synthetic light chain variable region CDR L2"
AASIRAT

SEQ ID NO: 1566 - DNA, 21 bp, Artificial Sequence
  source: /note="Description of Artificial Sequence: Synthetic light chain variable region CDR L2"
gctgcatccatcagggccact

SEQ ID NO: 1567 - protein, 9 aa, Artificial Sequence
  source: /note="Description of Artificial Sequence: Synthetic light chain variable region CDR L3"
QQYGSSPWT

SEQ ID NO: 1568 - DNA, 27 bp, Artificial Sequence
  source: /note="Description of Artificial Sequence: Synthetic light chain variable region CDR L3"
cagcaatatggcagctcaccgtggacg

SEQ ID NO: 1569 - DNA, 366 bp, Artificial Sequence
  source: /note="Description of Artificial Sequence: Synthetic heavy chain variable region"
caggtgcagctggtgcagtctggagctgaggtgaagaagcctggggcctcagtgaaggtctcctgcaaggcttctggttacatctttaccagttatggtgtcagctgggtgcgacaggcccctggacaagggcttaagtggatgggatggatcagcggttacaatggtaacacaaactatgaccagaaactccagggcagagtcaccatgaccacagacacatccacgagcacagcctacatggagctgaggagcctgacatctgacgacacggccgtttattactgtgcgagagattcattttcagagactgggactgggtttcctgacttctggggccagggaaccctggtcaccgtctcctca

SEQ ID NO: 1570 - protein, 122 aa, Artificial Sequence
  source: /note="Description of Artificial Sequence: Synthetic heavy chain variable region"
QVQLVQSGAEVKKPGASVKVSCKASGYIFTSYGVSWVRQAPGQGLKWMGWISGYNGNTNYDQKLQGRVTMTTDTSTSTAYMELRSLTSDDTAVYYCARDSFSETGTGFPDFWGQGTLVTVSS

SEQ ID NO: 1571 - protein, 9 aa, Artificial Sequence
  source: /note="Description of Artificial Sequence: Synthetic heavy chain variable region CDR H1"
YIFTSYGVS

SEQ ID NO: 1572 - DNA, 27 bp, Artificial Sequence
  source: /note="Description of Artificial Sequence: Synthetic heavy chain variable region CDR H1"
tacatctttaccagttatggtgtcagc

SEQ ID NO: 1573 - protein, 17 aa, Artificial Sequence
  source: /note="Description of Artificial Sequence: Synthetic heavy chain variable region CDR H2"
WISGYNGNTNYDQKLQG

SEQ ID NO: 1574 - DNA, 51 bp, Artificial Sequence
  source: /note="Description of Artificial Sequence: Synthetic heavy chain variable region CDR H2"
tggatcagcggttacaatggtaacacaaactatgaccagaaactccagggc

SEQ ID NO: 1575 - protein, 15 aa, Artificial Sequence
  source: /note="Description of Artificial Sequence: Synthetic heavy chain variable region CDR H3"
ARDSFSETGTGFPDF

SEQ ID NO: 1576 - DNA, 45 bp, Artificial Sequence
  source: /note="Description of Artificial Sequence: Synthetic heavy chain variable region CDR H3"
gcgagagattcattttcagagactgggactgggtttcctgacttc

SEQ ID NO: 1577 - DNA, 336 bp, Artificial Sequence
  source: /note="Description of Artificial Sequence: Synthetic light chain variable region"
gacatccagatgacccagtctccactctccctgcccgtcacccttggacagccggcctccatctcctgcaggtctagtcaaagcctcgaatacagtgatggaaacacctacttgaattggtttcagcagaggccaggccaatctccaaggcgcctaatttataaggtttctaaccgggactctggggtcccagacagattcagcggcagtgggtcaggcactgatttcacactgaaaatcagcagggtggaggctgaggatgttggagtttattactgcatgcaagccacacaccggcctcgcacgttcggccaagggaccaagctggagatcaaa

SEQ ID NO: 1578 - protein, 112 aa, Artificial Sequence
  source: /note="Description of Artificial Sequence: Synthetic light chain variable region"
DIQMTQSPLSLPVTLGQPASISCRSSQSLEYSDGNTYLNWFQQRPGQSPRRLIYKVSNRDSGVPDRFSGSGSGTDFTLKISRVEAEDVGVYYCMQATHRPRTFGQGTKLEIK

SEQ ID NO: 1579 - protein, 16 aa, Artificial Sequence
  source: /note="Description of Artificial Sequence: Synthetic light chain variable region CDR L1"
RSSQSLEYSDGNTYLN

SEQ ID NO: 1580 - DNA, 48 bp, Artificial Sequence; identical to SEQ ID NO: 1532
  source: /note="Description of Artificial Sequence: Synthetic light chain variable region CDR L1"

SEQ ID NO: 1581 - protein, 7 aa, Artificial Sequence
  source: /note="Description of Artificial Sequence: Synthetic light chain variable region CDR L2"
KVSNRDS

SEQ ID NO: 1582 - DNA, 21 bp, Artificial Sequence
  source: /note="Description of Artificial Sequence: Synthetic light chain variable region CDR L2"
aaggtttctaaccgggactct

SEQ ID NO: 1583 - protein, 9 aa, Artificial Sequence
  source: /note="Description of Artificial Sequence: Synthetic light chain variable region CDR L3"
MQATHRPRT

SEQ ID NO: 1584 - DNA, 27 bp, Artificial Sequence
  source: /note="Description of Artificial Sequence: Synthetic light chain variable region CDR L3"
atgcaagccacacaccggcctcgcacg

SEQ ID NO: 1585 - DNA, 372 bp, Artificial Sequence
  source: /note="Description of Artificial Sequence: Synthetic heavy chain variable region"
gaggtgcagctggtggagtctgggggaggcgtggtccagcctgggaggtccctgagactctcctgtgcagcgtctggattcaccttcagtagtttttctatgcactgggtccgccaggctccaggcaaggggctggagtgggtggcacttatatcatctgacgagaggaattcatactacgcagactccgtgaagggccgattcaccatctccagagacaattccaagaacacgctgtatctgcaaataagcaggctgaaagtcgaggacacggctgtgtattattgtgcgagagaggcatacgaagagtgggagctaacgatggggaaccttgaccactggggccagggaaccctggtcaccgtctcctca

SEQ ID NO: 1586 - protein, 124 aa, Artificial Sequence
  source: /note="Description of Artificial Sequence: Synthetic heavy chain variable region"
EVQLVESGGGVVQPGRSLRLSCAASGFTFSSFSMHWVRQAPGKGLEWVALISSDERNSYYADSVKGRFTISRDNSKNTLYLQISRLKVEDTAVYYCAREAYEEWELTMGNLDHWGQGTLVTVSS

SEQ ID NO: 1587 - protein, 9 aa, Artificial Sequence
  source: /note="Description of Artificial Sequence: Synthetic heavy chain variable region CDR H1"
FTFSSFSMH

SEQ ID NO: 1588 - DNA, 27 bp, Artificial Sequence
  source: /note="Description of Artificial Sequence: Synthetic heavy chain variable region CDR H1"
ttcaccttcagtagtttttctatgcac

SEQ ID NO: 1589 - protein, 17 aa, Artificial Sequence
  source: /note="Description of Artificial Sequence: Synthetic heavy chain variable region CDR H2"
LISSDERNSYYADSVKG

SEQ ID NO: 1590 - DNA, 51 bp, Artificial Sequence
  source: /note="Description of Artificial Sequence: Synthetic heavy chain variable region CDR H2"
cttatatcatctgacgagaggaattcatactacgcagactccgtgaagggc

SEQ ID NO: 1591 - protein, 17 aa, Artificial Sequence
  source: /note="Description of Artificial Sequence: Synthetic heavy chain variable region CDR H3"
AREAYEEWELTMGNLDH

SEQ ID NO: 1592 - DNA, 51 bp, Artificial Sequence
  source: /note="Description of Artificial Sequence: Synthetic heavy chain variable region CDR H3"
gcgagagaggcatacgaagagtgggagctaacgatggggaaccttgaccac

SEQ ID NO: 1593 - DNA, 321 bp, Artificial Sequence
  source: /note="Description of Artificial Sequence: Synthetic light chain variable region"
gacatccagttgacccagtctccatcctccctgtctgcatctgtaggagacagagtcaccatcacttgccgggcaagtcagggcattggaaatgatttaggctggtatcagcagaaaccagggaaagcccctaagcgcctgatctatagtacatacagcttgcaaagtggggtcccatcaaggttcagcggcagtggatctgggacagaattcactctcacaatcagcagcctgcagcctgaagattttgcaacttattactgtctacagcataatcgttaccccttcactttcggccctgggaccaagctggagatcaaa

SEQ ID NO: 1594 - protein, 107 aa, Artificial Sequence
  source: /note="Description of Artificial Sequence: Synthetic light chain variable region"
DIQLTQSPSSLSASVGDRVTITCRASQGIGNDLGWYQQKPGKAPKRLIYSTYSLQSGVPSRFSGSGSGTEFTLTISSLQPEDFATYYCLQHNRYPFTFGPGTKLEIK

SEQ ID NO: 1595 - protein, 11 aa, Artificial Sequence
  source: /note="Description of Artificial Sequence: Synthetic light chain variable region CDR L1"
RASQGIGNDLG

SEQ ID NO: 1596 - DNA, 33 bp, Artificial Sequence
  source: /note="Description of Artificial Sequence: Synthetic light chain variable region CDR L1"
cgggcaagtcagggcattggaaatgatttaggc

SEQ ID NO: 1597 - protein, 7 aa, Artificial Sequence
  source: /note="Description of Artificial Sequence: Synthetic light chain variable region CDR L2"
STYSLQS

SEQ ID NO: 1598 - DNA, 21 bp, Artificial Sequence
  source: /note="Description of Artificial Sequence: Synthetic light chain variable region CDR L2"
agtacatacagcttgcaaagt

SEQ ID NO: 1599 - protein, 9 aa, Artificial Sequence
  source: /note="Description of Artificial Sequence: Synthetic light chain variable region CDR L3"
LQHNRYPFT

SEQ ID NO: 1600 - DNA, 27 bp, Artificial Sequence
  source: /note="Description of Artificial Sequence: Synthetic light chain variable region CDR L3"
ctacagcataatcgttaccccttcact

SEQ ID NO: 1601 - DNA, 360 bp, Artificial Sequence
  source: /note="Description of Artificial Sequence: Synthetic heavy chain variable region"
caggtgcagctgcaggagtcgggcccaggactggtgaagccttcggagaccctgtccctcacctgcactgtctctggtgcctccgtcaccactaatacttactactggacctggatccggcagcccccagggaaggaactggagtggattggatatatccatcacactgggaacacccactacaacccctccctcgagagtcgactcaccatgtcactagacacgtccaggaaccagttctctctgaaccttaggtctgccaccactgcggacacggccgtttattactgtgcgagaggcgaacattttgcgtactggtggggaaactggggccagggagccctggtcaccgtctcctca

SEQ ID NO: 1602 - protein, 120 aa, Artificial Sequence
  source: /note="Description of Artificial Sequence: Synthetic heavy chain variable region"
QVQLQESGPGLVKPSETLSLTCTVSGASVTTNTYYWTWIRQPPGKELEWIGYIHHTGNTHYNPSLESRLTMSLDTSRNQFSLNLRSATTADTAVYYCARGEHFAYWWGNWGQGALVTVSS

SEQ ID NO: 1603 - protein, 11 aa, Artificial Sequence
  source: /note="Description of Artificial Sequence: Synthetic heavy chain variable region CDR H1"
ASVTTNTYYWT

SEQ ID NO: 1604 - DNA, 33 bp, Artificial Sequence
  source: /note="Description of Artificial Sequence: Synthetic heavy chain variable region CDR H1"
gcctccgtcaccactaatacttactactggacc

SEQ ID NO: 1605 - protein, 16 aa, Artificial Sequence
  source: /note="Description of Artificial Sequence: Synthetic heavy chain variable region CDR H2"
YIHHTGNTHYNPSLES

SEQ ID NO: 1606 - DNA, 48 bp, Artificial Sequence
  source: /note="Description of Artificial Sequence: Synthetic heavy chain variable region CDR H2"
tatatccatcacactgggaacacccactacaacccctccctcgagagt

SEQ ID NO: 1607 - protein, 12 aa, Artificial Sequence
  source: /note="Description of Artificial Sequence: Synthetic heavy chain variable region CDR H3"
ARGEHFAYWWGN

SEQ ID NO: 1608 - DNA, 36 bp, Artificial Sequence
  source: /note="Description of Artificial Sequence: Synthetic heavy chain variable region CDR H3"
gcgagaggcgaacattttgcgtactggtggggaaac

SEQ ID NO: 1609 - DNA, 321 bp, Artificial Sequence
  source: /note="Description of Artificial Sequence: Synthetic light chain variable region"
gacatccgggtgacccagtctccatcttccgtgtctgcatctgtaggagacagagtcaccatcacttgtcgggcgagtcagggtattgccagatggttagcctggtatcagcagaaaccagggaaagcccctaaactcctgatctatgctgcatccagtttgcaaggtggggtcccatcaaggttcagcggcagtggatatgggacagatttcactctcaccatcagcagcctgcagcctgaagattttgcaacttactactgtcaacaggctaacagttttcctcgaacgttcggccaagggaccaaggtggagatcaaa

SEQ ID NO: 1610 - protein, 107 aa, Artificial Sequence
  source: /note="Description of Artificial Sequence: Synthetic light chain variable region"
DIRVTQSPSSVSASVGDRVTITCRASQGIARWLAWYQQKPGKAPKLLIYAASSLQGGVPSRFSGSGYGTDFTLTISSLQPEDFATYYCQQANSFPRTFGQGTKVEIK

SEQ ID NO: 1611 - protein, 11 aa, Artificial Sequence
  source: /note="Description of Artificial Sequence: Synthetic light chain variable region CDR L1"
RASQGIARWLA

SEQ ID NO: 1612 - DNA, 33 bp, Artificial Sequence
  source: /note="Description of Artificial Sequence: Synthetic light chain variable region CDR L1"
cgggcgagtcagggtattgccagatggttagcc

SEQ ID NO: 1613 - protein, 7 aa, Artificial Sequence
  source: /note="Description of Artificial Sequence: Synthetic light chain variable region CDR L2"
AASSLQG

SEQ ID NO: 1614 - DNA, 21 bp, Artificial Sequence
  source: /note="Description of Artificial Sequence: Synthetic light chain variable region CDR L2"
gctgcatccagtttgcaaggt

SEQ ID NO: 1615 - protein, 9 aa, Artificial Sequence
  source: /note="Description of Artificial Sequence: Synthetic light chain variable region CDR L3"
QQANSFPRT

SEQ ID NO: 1616 - DNA, 27 bp, Artificial Sequence
  source: /note="Description of Artificial Sequence: Synthetic light chain variable region CDR L3"
caacaggctaacagttttcctcgaacg

SEQ ID NO: 1617 - DNA, 363 bp, Artificial Sequence
  source: /note="Description of Artificial Sequence: Synthetic heavy chain variable region"
caggtccagcttgtacagtctgggcctgaggtgaagaagcctggggcctcagtgaaggtctcctgcgaggcttctggatacaccttcaccgacttctttgtgcactgggtgcgacaggcccctggtgaggggcttgtgtggttgggatgggtcaaccctctcagtggcgccacaaagtatgcacagaactttcagggcagggtcaccatgaccagtgacacgtccatcaccacagcctacatggcactgagcagcctgagacatgacgacacggccgtctattactgtacgagccagacttcaccttataccccgggcgctatgggcgtttggggccaagggaccacggtcaccgtctcctca

SEQ ID NO: 1618 - protein, 121 aa, Artificial Sequence
  source: /note="Description of Artificial Sequence: Synthetic heavy chain variable region"
QVQLVQSGPEVKKPGASVKVSCEASGYTFTDFFVHWVRQAPGEGLVWLGWVNPLSGATKYAQNFQGRVTMTSDTSITTAYMALSSLRHDDTAVYYCTSQTSPYTPGAMGVWGQGTTVTVSS

SEQ ID NO: 1619 - protein, 9 aa, Artificial Sequence
  source: /note="Description of Artificial Sequence: Synthetic heavy chain variable region CDR H1"
YTFTDFFVH

SEQ ID NO: 1620 - DNA, 27 bp, Artificial Sequence
  source: /note="Description of Artificial Sequence: Synthetic heavy chain variable region CDR H1"
tacaccttcaccgacttctttgtgcac

SEQ ID NO: 1621 - protein, 17 aa, Artificial Sequence
  source: /note="Description of Artificial Sequence: Synthetic heavy chain variable region CDR H2"
WVNPLSGATKYAQNFQG

SEQ ID NO: 1622 - DNA, 51 bp, Artificial Sequence
  source: /note="Description of Artificial Sequence: Synthetic heavy chain variable region CDR H2"
tgggtcaaccctctcagtggcgccacaaagtatgcacagaactttcagggc

SEQ ID NO: 1623 - protein, 14 aa, Artificial Sequence
  source: /note="Description of Artificial Sequence: Synthetic heavy chain variable region CDR H3"
TSQTSPYTPGAMGV

SEQ ID NO: 1624 - DNA, 42 bp, Artificial Sequence
  source: /note="Description of Artificial Sequence: Synthetic heavy chain variable region CDR H3"
acgagccagacttcaccttataccccgggcgctatgggcgtt

SEQ ID NO: 1625 - DNA, 321 bp, Artificial Sequence
  source: /note="Description of Artificial Sequence: Synthetic light chain variable region"
gacatccgggtgacccagtctccagcctccctgtctgcatttgttggagacagagtcaccatcacttgccgggcaagtccggccattagcggctatttaagttggtatcagcagaaggcaggcaaagcccctaagatcctgatctatgatgcatctaatttgtatagtggggccccatcacggttcagtggcagtagatctgggacagatttcactctcaccatcaccagtctgcaacctgaagattttgcaacttactactgtcaacagacttacaatggcctaatcgctttcggccctgggaccaaggtggaaatcaaa

SEQ ID NO: 1626 - protein, 107 aa, Artificial Sequence
  source: /note="Description of Artificial Sequence: Synthetic light chain variable region"
DIRVTQSPASLSAFVGDRVTITCRASPAISGYLSWYQQKAGKAPKILIYDASNLYSGAPSRFSGSRSGTDFTLTITSLQPEDFATYYCQQTYNGLIAFGPGTKVEIK

SEQ ID NO: 1627 - protein, 11 aa, Artificial Sequence
  source: /note="Description of Artificial Sequence: Synthetic light chain variable region CDR L1"
RASPAISGYLS

SEQ ID NO: 1628 - DNA, 33 bp, Artificial Sequence
  source: /note="Description of Artificial Sequence: Synthetic light chain variable region CDR L1"
cgggcaagtccggccattagcggctatttaagt

SEQ ID NO: 1629 - protein, 7 aa, Artificial Sequence
  source: /note="Description of Artificial Sequence: Synthetic light chain variable region CDR L2"
DASNLYS

SEQ ID NO: 1630 - DNA, 21 bp, Artificial Sequence
  source: /note="Description of Artificial Sequence: Synthetic light chain variable region CDR L2"
gatgcatctaatttgtatagt

SEQ ID NO: 1631 - protein, 9 aa, Artificial Sequence
  source: /note="Description of Artificial Sequence: Synthetic light chain variable region CDR L3"
QQTYNGLIA

SEQ ID NO: 1632 - DNA, 27 bp, Artificial Sequence
  source: /note="Description of Artificial Sequence: Synthetic light chain variable region CDR L3"
caacagacttacaatggcctaatcgct

SEQ ID NO: 1633 - DNA, 366 bp, Artificial Sequence
  source: /note="Description of Artificial Sequence: Synthetic heavy chain variable region"
gaggtgcagctgttggagtctgggggaggcgtggtccagcctgggaagtccctgagactctcctgtgcagcctctggattcaccttcaatacctatgctatacactgggtccgccaggctccaggcaagggcctggagtgggtggcagctatatcatatgatggaagcaatgaatactactcaaactccgtgaagggccgattcaccatctccagagacaattccaagtacacgctggagctgcaaatgaacagcctgagacctgaggacacggctgtgtattactgtgcgagaggcgcctcctactactatgtgagtagtgaccttggctactggggccagggaaccctggtcaccgtctcctca

SEQ ID NO: 1634 - protein, 122 aa, Artificial Sequence
  source: /note="Description of Artificial Sequence: Synthetic heavy chain variable region"
EVQLLESGGGVVQPGKSLRLSCAASGFTFNTYAIHWVRQAPGKGLEWVAAISYDGSNEYYSNSVKGRFTISRDNSKYTLELQMNSLRPEDTAVYYCARGASYYYVSSDLGYWGQGTLVTVSS

SEQ ID NO: 1635 - protein, 9 aa, Artificial Sequence
  source: /note="Description of Artificial Sequence: Synthetic heavy chain variable region CDR H1"
FTFNTYAIH

SEQ ID NO: 1636 - DNA, 27 bp, Artificial Sequence
  source: /note="Description of Artificial Sequence: Synthetic heavy chain variable region CDR H1"
ttcaccttcaatacctatgctatacac

SEQ ID NO: 1637 - protein, 17 aa, Artificial Sequence
  source: /note="Description of Artificial Sequence: Synthetic heavy chain variable region CDR H2"
AISYDGSNEYYSNSVKG

SEQ ID NO: 1638 - DNA, 51 bp, Artificial Sequence
  source: /note="Description of Artificial Sequence: Synthetic heavy chain variable region CDR H2"
gctatatcatatgatggaagcaatgaatactactcaaactccgtgaagggc

SEQ ID NO: 1639 - protein, 15 aa, Artificial Sequence
  source: /note="Description of Artificial Sequence: Synthetic heavy chain variable region CDR H3"
ARGASYYYVSSDLGY

SEQ ID NO: 1640 - DNA, 45 bp, Artificial Sequence
  source: /note="Description of Artificial Sequence: Synthetic heavy chain variable region CDR H3"
gcgagaggcgcctcctactactatgtgagtagtgaccttggctac

SEQ ID NO: 1641 - DNA, 333 bp, Artificial Sequence
  source: /note="Description of Artificial Sequence: Synthetic light chain variable region"
cagtctgtcgtgacgcagccgccctcagtgtctggggccccagggcagagggtcaccatctcctgcactgggagcagctccaacatcgggtcaggttatgatgtgcactggtaccagcagcttccaggaacagcccccaaagtcgtcatctatggtaacatcaatcggccctcaggggtccctgagcgattctctggctccaagtctggcacctcagcctccctggccatcactgggctccaggctgaggatgaggctgattattactgccagtcctatgacagcctgagtgcctcttgggtgttcggcggagggaccaagctgaccgtccta

SEQ ID NO: 1642 - protein, 111 aa, Artificial Sequence
  source: /note="Description of Artificial Sequence: Synthetic light chain variable region"
QSVVTQPPSVSGAPGQRVTISCTGSSSNIGSGYDVHWYQQLPGTAPKVVIYGNINRPSGVPERFSGSKSGTSASLAITGLQAEDEADYYCQSYDSLSASWVFGGGTKLTVL

SEQ ID NO: 1643 - protein, 14 aa, Artificial Sequence
  source: /note="Description of Artificial Sequence: Synthetic light chain variable region CDR L1"
TGSSSNIGSGYDVH

SEQ ID NO: 1644 - DNA, 42 bp, Artificial Sequence; identical to SEQ ID NO: 284
  source: /note="Description of Artificial Sequence: Synthetic light chain variable region CDR L1"

SEQ ID NO: 1645 - protein, 7 aa, Artificial Sequence
  source: /note="Description of Artificial Sequence: Synthetic light chain variable region CDR L2"
GNINRPS

SEQ ID NO: 1646 - DNA, 21 bp, Artificial Sequence
  source: /note="Description of Artificial Sequence: Synthetic light chain variable region CDR L2"
ggtaacatcaatcggccctca

SEQ ID NO: 1647 - protein, 11 aa, Artificial Sequence
  source: /note="Description of Artificial Sequence: Synthetic light chain variable region CDR L3"
QSYDSLSASWV

SEQ ID NO: 1648 - DNA, 33 bp, Artificial Sequence; identical to SEQ ID NO: 288
  source: /note="Description of Artificial Sequence: Synthetic light chain variable region CDR L3"

SEQ ID NO: 1649 - DNA, 375 bp, Artificial Sequence
  source: /note="Description of Artificial Sequence: Synthetic heavy chain variable region"
caggtccagcttgtgcagtctggggctgaggtgaagaagcctgggtcctcggtgaaggtctcctgcaaggcctctggaggcaccttcagcggccacgctatcaactgggtgcgacaggcccctggacaagggctcgaatggatgggagggatcatccatatatttgggacagtaaactacgctccgaagttccagggcagagtcacgatcaccgcggacgcatccacgggcacagtttacatggagttgagcagcctgatatctgaggacacggccgtatattattgtgcgagagatgcttacgaagtgtggactggttcttatctccccccttttgacgactggggccagggaaccctggtcactgtctcctca

SEQ ID NO: 1650 - protein, 125 aa, Artificial Sequence
  source: /note="Description of Artificial Sequence: Synthetic heavy chain variable region"
QVQLVQSGAEVKKPGSSVKVSCKASGGTFSGHAINWVRQAPGQGLEWMGGIIHIFGTVNYAPKFQGRVTITADASTGTVYMELSSLISEDTAVYYCARDAYEVWTGSYLPPFDDWGQGTLVTVSS

SEQ ID NO: 1651 - protein, 9 aa, Artificial Sequence
  source: /note="Description of Artificial Sequence: Synthetic heavy chain variable region CDR H1"
GTFSGHAIN

SEQ ID NO: 1652 - DNA, 27 bp, Artificial Sequence
  source: /note="Description of Artificial Sequence: Synthetic heavy chain variable region CDR H1"
ggcaccttcagcggccacgctatcaac

SEQ ID NO: 1653 - protein, 17 aa, Artificial Sequence
  source: /note="Description of Artificial Sequence: Synthetic heavy chain variable region CDR H2"
GIIHIFGTVNYAPKFQG

SEQ ID NO: 1654 - DNA, 51 bp, Artificial Sequence; identical to SEQ ID NO: 1174
  source: /note="Description of Artificial Sequence: Synthetic heavy chain variable region CDR H2"

SEQ ID NO: 1655 - protein, 18 aa, Artificial Sequence
  source: /note="Description of Artificial Sequence: Synthetic heavy chain variable region CDR H3"
ARDAYEVWTGSYLPPFDD

SEQ ID NO: 1656 - DNA, 54 bp, Artificial Sequence
  source: /note="Description of Artificial Sequence: Synthetic heavy chain variable region CDR H3"
gcgagagatgcttacgaagtgtggactggttcttatctccccccttttgacgac

SEQ ID NO: 1657 - DNA, 324 bp, Artificial Sequence
  source: /note="Description of Artificial Sequence: Synthetic light chain variable region"
gatattgtgatgacgcagtctccaggcaccctgtctttgtctcccggggacagagtcaccctctcctgcagggccagtcagactgttacaagcagctacttagcctggtaccagcagaaacctggccaggctcccaggctcctcatctatggtgcattcaccagggccactggcatcccagacaggttcagtggcagtgggtctgggacagacttcactctcagcatcagcagactggagcctgaagattttgcagtatattattgtcagcagtatggtagctcattcctcactttcggcggagggaccaaagtggatatcaaa

SEQ ID NO: 1658 - protein, 108 aa, Artificial Sequence
  source: /note="Description of Artificial Sequence: Synthetic light chain variable region"
DIVMTQSPGTLSLSPGDRVTLSCRASQTVTSSYLAWYQQKPGQAPRLLIYGAFTRATGIPDRFSGSGSGTDFTLSISRLEPEDFAVYYCQQYGSSFLTFGGGTKVDIK

SEQ ID NO: 1659 - protein, 12 aa, Artificial Sequence
  source: /note="Description of Artificial Sequence: Synthetic light chain variable region CDR L1"
RASQTVTSSYLA

SEQ ID NO: 1660 - DNA, 36 bp, Artificial Sequence; identical to SEQ ID NO: 844
  source: /note="Description of Artificial Sequence: Synthetic light chain variable region CDR L1"

SEQ ID NO: 1661 - protein, 7 aa, Artificial Sequence
  source: /note="Description of Artificial Sequence: Synthetic light chain variable region CDR L2"
GAFTRAT

SEQ ID NO: 1662 - DNA, 21 bp, Artificial Sequence
  source: /note="Description of Artificial Sequence: Synthetic light chain variable region CDR L2"
ggtgcattcaccagggccact

SEQ ID NO: 1663 - protein, 9 aa, Artificial Sequence
  source: /note="Description of Artificial Sequence: Synthetic light chain variable region CDR L3"
QQYGSSFLT

SEQ ID NO: 1664 - DNA, 27 bp, Artificial Sequence
  source: /note="Description of Artificial Sequence: Synthetic light chain variable region CDR L3"
cagcagtatggtagctcattcctcact

SEQ ID NO: 1665 - DNA, 369 bp, Artificial Sequence
  source: /note="Description of Artificial Sequence: Synthetic heavy chain variable region"
gaggtgcagctggtggaatctgggggaggcctggtcaggcctggggggtccctgagactctcctgtgcagcctctggattcagtctcagtagttacggcatgagttgggtccgccaggctccagggaagggtctggagtgggtctcatccattactgccggcagtagttacataaattacgctgactcagtgaagggccggttcaccatctccagagacaacgccaagagttcactgttcctgcaaatgaccagcctgagagtcgaggacacggctgtttatttctgtgtgagagaggcgtatgccagctcgtcggccctttactggttcgacccctggggccagggaaccctggtcaccgtctcctca

SEQ ID NO: 1666 - protein, 123 aa, Artificial Sequence
  source: /note="Description of Artificial Sequence: Synthetic heavy chain variable region"
EVQLVESGGGLVRPGGSLRLSCAASGFSLSSYGMSWVRQAPGKGLEWVSSITAGSSYINYADSVKGRFTISRDNAKSSLFLQMTSLRVEDTAVYFCVREAYASSSALYWFDPWGQGTLVTVSS

SEQ ID NO: 1667 - protein, 9 aa, Artificial Sequence
  source: /note="Description of Artificial Sequence: Synthetic heavy chain variable region CDR H1"
FSLSSYGMS

SEQ ID NO: 1668 - DNA, 27 bp, Artificial Sequence
  source: /note="Description of Artificial Sequence: Synthetic heavy chain variable region CDR H1"
ttcagtctcagtagttacggcatgagt

SEQ ID NO: 1669 - protein, 17 aa, Artificial Sequence
  source: /note="Description of Artificial Sequence: Synthetic heavy chain variable region CDR H2"
SITAGSSYINYADSVKG

SEQ ID NO: 1670 - DNA, 51 bp, Artificial Sequence
  source: /note="Description of Artificial Sequence: Synthetic heavy chain variable region CDR H2"
tccattactgccggcagtagttacataaattacgctgactcagtgaagggc

SEQ ID NO: 1671 - protein, 16 aa, Artificial Sequence
  source: /note="Description of Artificial Sequence: Synthetic heavy chain variable region CDR H3"
VREAYASSSALYWFDP

SEQ ID NO: 1672 - DNA, 48 bp, Artificial Sequence
  source: /note="Description of Artificial Sequence: Synthetic heavy chain variable region CDR H3"
gtgagagaggcgtatgccagctcgtcggccctttactggttcgacccc

SEQ ID NO: 1673 - DNA, 333 bp, Artificial Sequence
  source: /note="Description of Artificial Sequence: Synthetic light chain variable region"
cagtctgtcctgacgcagccgccctcagtctctggggccccagggcagagggtcaccatctcctgcactgggagcagctccaatctcggggcgggttatgttgttcactggtaccagcaacttccaggaacatcccccaaactcctcatctatggtaacaccgatcggccctcaggggtccccgaccgattctctggctccaagtctggcacctcagcctccctggccatcagtgggctccaggctgaggatgaggctgattattactgccagtcctatgacagtagcctgagtggctgggtgttcggcggagggaccaagctgaccgtccta

SEQ ID NO: 1674 - protein, 111 aa, Artificial Sequence
  source: /note="Description of Artificial Sequence: Synthetic light chain variable region"
QSVLTQPPSVSGAPGQRVTISCTGSSSNLGAGYVVHWYQQLPGTSPKLLIYGNTDRPSGVPDRFSGSKSGTSASLAISGLQAEDEADYYCQSYDSSLSGWVFGGGTKLTVL

SEQ ID NO: 1675 - protein, 14 aa, Artificial Sequence
  source: /note="Description of Artificial Sequence: Synthetic light chain variable region CDR L1"
TGSSSNLGAGYVVH

SEQ ID NO: 1676 - DNA, 42 bp, Artificial Sequence
  source: /note="Description of Artificial Sequence: Synthetic light chain variable region CDR L1"
actgggagcagctccaatctcggggcgggttatgttgttcac

SEQ ID NO: 1677 - protein, 7 aa, Artificial Sequence
  source: /note="Description of Artificial Sequence: Synthetic light chain variable region CDR L2"
GNTDRPS

SEQ ID NO: 1678 - DNA, 21 bp, Artificial Sequence
  source: /note="Description of Artificial Sequence: Synthetic light chain variable region CDR L2"
ggtaacaccgatcggccctca

SEQ ID NO: 1679 - protein, 11 aa, Artificial Sequence
  source: /note="Description of Artificial Sequence: Synthetic light chain variable region CDR L3"
QSYDSSLSGWV

SEQ ID NO: 1680 - DNA, 33 bp, Artificial Sequence
  source: /note="Description of Artificial Sequence: Synthetic light chain variable region CDR L3"
cagtcctatgacagtagcctgagtggctgggtg

SEQ ID NO: 1681 - DNA, 393 bp, Artificial Sequence
  source: /note="Description of Artificial Sequence: Synthetic heavy chain variable region"
gaggtgcagctggtggagtctgggggaggcttagtacagcctggggggtccctgcgactctcctgtgcagcctctggattcagcttcaatacctatagcatgaactgggtccgccaggctccagggaagggattggagtggctttcattcattagtagtagtagtcataccctatactacgcagactctgtgaagggccgattcaccgtcttcagagacaatgccaagcactcgctctttctgcaaatgaacggcctgagagacgaggacacggctgtttatttctgtgcgagatcccttggttcggggaattatgataacgaagatcagacattttactactactacggtatggacgtctggggccaagggaccacggtcaccgtctcctca

SEQ ID NO: 1682 - protein, 131 aa, Artificial Sequence
  source: /note="Description of Artificial Sequence: Synthetic heavy chain variable region"
EVQLVESGGGLVQPGGSLRLSCAASGFSFNTYSMNWVRQAPGKGLEWLSFISSSSHTLYYADSVKGRFTVFRDNAKHSLFLQMNGLRDEDTAVYFCARSLGSGNYDNEDQTFYYYYGMDVWGQGTTVTVSS

SEQ ID NO: 1683 - protein, 9 aa, Artificial Sequence
  source: /note="Description of Artificial Sequence: Synthetic heavy chain variable region CDR H1"
FSFNTYSMN

SEQ ID NO: 1684 - DNA, 27 bp, Artificial Sequence
  source: /note="Description of Artificial Sequence: Synthetic heavy chain variable region CDR H1"
ttcagcttcaatacctatagcatgaac

SEQ ID NO: 1685 - protein, 17 aa, Artificial Sequence
  source: /note="Description of Artificial Sequence: Synthetic heavy chain variable region CDR H2"
FISSSSHTLYYADSVKG

SEQ ID NO: 1686 - DNA, 51 bp, Artificial Sequence
  source: /note="Description of Artificial Sequence: Synthetic heavy chain variable region CDR H2"
ttcattagtagtagtagtcataccctatactacgcagactctgtgaagggc

SEQ ID NO: 1687 - protein, 24 aa, Artificial Sequence
  source: /note="Description of Artificial Sequence: Synthetic heavy chain variable region CDR H3"
ARSLGSGNYDNEDQTFYYYYGMDV

SEQ ID NO: 1688 - DNA, 72 bp, Artificial Sequence
  source: /note="Description of Artificial Sequence: Synthetic heavy chain variable region CDR H3"
gcgagatcccttggttcggggaattatgataacgaagatcagacattttactactactacggtatggacgtc

SEQ ID NO: 1689 - DNA, 339 bp, Artificial Sequence
  source: /note="Description of Artificial Sequence: Synthetic light chain variable region"
gaaacgacactcacgcagtctccactctccctgcccgtcacccctggagagccggcctccatatcctgccggtctagtcagagcctcctgtttcatagtaatggacacaattatttggattggtacctgcagaagccagggcagtctccacaactcctgatccatttgggttctaatcgggcctccggagtccctgacaggttcagtggcagtggatcaggcacagattttacactgaaaatcagcagagtggagcctgaggatgttggggtttattactgtatgcaagctctacaaactccgtacacttttggccaggggaccaaggtggagatcaaa

SEQ ID NO: 1690 - protein, 113 aa, Artificial Sequence
  source: /note="Description of Artificial Sequence: Synthetic light chain variable region"
ETTLTQSPLSLPVTPGEPASISCRSSQSLLFHSNGHNYLDWYLQKPGQSPQLLIHLGSNRASGVPDRFSGSGSGTDFTLKISRVEPEDVGVYYCMQALQTPYTFGQGTKVEIK

SEQ ID NO: 1691 - protein, 17 aa, Artificial Sequence
  source: /note="Description of Artificial Sequence: Synthetic light chain variable region CDR L1"
RSSQSLLFHSNGHNYLD

SEQ ID NO: 1692 - DNA, 51 bp, Artificial Sequence
  source: /note="Description of Artificial Sequence: Synthetic light chain variable region CDR L1"
cggtctagtcagagcctcctgtttcatagtaatggacacaattatttggat

SEQ ID NO: 1693 - protein, 7 aa, Artificial Sequence
  source: /note="Description of Artificial Sequence: Synthetic light chain variable region CDR L2"
LGSNRAS

SEQ ID NO: 1694 - DNA, 21 bp, Artificial Sequence
  source: /note="Description of Artificial Sequence: Synthetic light chain variable region CDR L2"
ttgggttctaatcgggcctcc

SEQ ID NO: 1695 - protein, 9 aa, Artificial Sequence
  source: /note="Description of Artificial Sequence: Synthetic light chain variable region CDR L3"
MQALQTPYT

SEQ ID NO: 1696 - DNA, 27 bp, Artificial Sequence
  source: /note="Description of Artificial Sequence: Synthetic light chain variable region CDR L3"
atgcaagctctacaaactccgtacact

SEQ ID NO: 1697 - DNA, 372 bp, Artificial Sequence; identical to SEQ ID NO: 1009
  source: /note="Description of Artificial Sequence: Synthetic heavy chain variable region"

SEQ ID NO: 1698 - protein, 124 aa, Artificial Sequence; identical to SEQ ID NO: 1010
  source: /note="Description of Artificial Sequence: Synthetic heavy chain variable region"

SEQ ID NO: 1699 - protein, 11 aa, Artificial Sequence
  source: /note="Description of Artificial Sequence: Synthetic heavy chain variable region CDR H1"
VSVTINDYYWT

SEQ ID NO: 1700 - DNA, 33 bp, Artificial Sequence; identical to SEQ ID NO: 1012
  source: /note="Description of Artificial Sequence: Synthetic heavy chain variable region CDR H1"

SEQ ID NO: 1701 - protein, 16 aa, Artificial Sequence
  source: /note="Description of Artificial Sequence: Synthetic heavy chain variable region CDR H2"
NIYNSGSTYQNPSLQS

SEQ ID NO: 1702 - DNA, 48 bp, Artificial Sequence; identical to SEQ ID NO: 1014
  source: /note="Description of Artificial Sequence: Synthetic heavy chain variable region CDR H2"

SEQ ID NO: 1703 - protein, 16 aa, Artificial Sequence
  source: /note="Description of Artificial Sequence: Synthetic heavy chain variable region CDR H3"
ARDLGTANNYYFGMDV

SEQ ID NO: 1704 - DNA, 48 bp, Artificial Sequence; identical to SEQ ID NO: 1016
  source: /note="Description of Artificial Sequence: Synthetic heavy chain variable region CDR H3"

SEQ ID NO: 1705 - DNA, 324 bp, Artificial Sequence
  source: /note="Description of Artificial Sequence: Synthetic light chain variable region"
gatattgtgctgacgcagtctccagccaccctgtctttgtctccaggggaaagagccactctctcctgcagggccagtcagagtgttagcacctacttagcctggtaccaacagaaacctggccaggctcccaggctcctcatctataatggatccaacagggtcactggcaccccagccaggttcagtggcagtgggtctgggacagacttcactctcaccatcagcagcgtagagcctgaagattttgcagtttattactgtcagcagcgtagcaactggcctccgtacacttttggccaggggaccaaggtggagatcaaa

SEQ ID NO: 1706 - protein, 108 aa, Artificial Sequence
  source: /note="Description of Artificial Sequence: Synthetic light chain variable region"
DIVLTQSPATLSLSPGERATLSCRASQSVSTYLAWYQQKPGQAPRLLIYNGSNRVTGTPARFSGSGSGTDFTLTISSVEPEDFAVYYCQQRSNWPPYTFGQGTKVEIK

SEQ ID NO: 1707 - protein, 11 aa, Artificial Sequence
  source: /note="Description of Artificial Sequence: Synthetic light chain variable region CDR L1"
RASQSVSTYLA

SEQ ID NO: 1708 - DNA, 33 bp, Artificial Sequence; identical to SEQ ID NO: 1020
  source: /note="Description of Artificial Sequence: Synthetic light chain variable region CDR L1"

SEQ ID NO: 1709 - protein, 7 aa, Artificial Sequence
  source: /note="Description of Artificial Sequence: Synthetic light chain variable region CDR L2"
NGSNRVT

SEQ ID NO: 1710 - DNA, 21 bp, Artificial Sequence
  source: /note="Description of Artificial Sequence: Synthetic light chain variable region CDR L2"
aatggatccaacagggtcact

SEQ ID NO: 1711 - protein, 10 aa, Artificial Sequence
  source: /note="Description of Artificial Sequence: Synthetic light chain variable region CDR L3"
QQRSNWPPYT

SEQ ID NO: 1712 - DNA, 30 bp, Artificial Sequence; identical to SEQ ID NO: 1024
  source: /note="Description of Artificial Sequence: Synthetic light chain variable region CDR L3"

SEQ ID NO: 1713 - DNA, 369 bp, Artificial Sequence
  source: /note="Description of Artificial Sequence: Synthetic heavy chain variable region"
gaggtgcagctggtggagtcgggccctggactggtgaagccttcagagaccctgtccctcagttgcattgtctctggtgactccatcaccagtaatgattactactggagttggatccgccagtccccagggaagggcctggagtggattgggtacatctatcacagcggggccaccttctacactccgtccctacggagtcgagtgaccatatcgacagacaggtccaagaaccagttctccctgagactgtcgtctgtgaccgccgcagacacggccgtatattattgtgccagtggacctgtggggatggctacaagcaactggttcgacccctggggccagggaaccctggtcaccgtctcttca

SEQ ID NO: 1714 - protein, 123 aa, Artificial Sequence
  source: /note="Description of Artificial Sequence: Synthetic heavy chain variable region"
EVQLVESGPGLVKPSETLSLSCIVSGDSITSNDYYWSWIRQSPGKGLEWIGYIYHSGATFYTPSLRSRVTISTDRSKNQFSLRLSSVTAADTAVYYCASGPVGMATSNWFDPWGQGTLVTVSS

SEQ ID NO: 1715 - protein, 11 aa, Artificial Sequence
  source: /note="Description of Artificial Sequence: Synthetic heavy chain variable region CDR H1"
DSITSNDYYWS

SEQ ID NO: 1716 - DNA, 33 bp, Artificial Sequence
  source: /note="Description of Artificial Sequence: Synthetic heavy chain variable region CDR H1"
gactccatcaccagtaatgattactactggagt

SEQ ID NO: 1717 - protein, 16 aa, Artificial Sequence
  source: /note="Description of Artificial Sequence: Synthetic heavy chain variable region CDR H2"
YIYHSGATFYTPSLRS

SEQ ID NO: 1718 - DNA, 48 bp, Artificial Sequence
  source: /note="Description of Artificial Sequence: Synthetic heavy chain variable region CDR H2"
tacatctatcacagcggggccaccttctacactccgtccctacggagt

SEQ ID NO: 1719 - protein, 15 aa, Artificial Sequence
  source: /note="Description of Artificial Sequence: Synthetic heavy chain variable region CDR H3"
ASGPVGMATSNWFDP

SEQ ID NO: 1720 - DNA, 45 bp, Artificial Sequence
  source: /note="Description of Artificial Sequence: Synthetic heavy chain variable region CDR H3"
gccagtggacctgtggggatggctacaagcaactggttcgacccc

SEQ ID NO: 1721 - DNA, 327 bp, Artificial Sequence
  source: /note="Description of Artificial Sequence: Synthetic light chain variable region"
cagcctgtgctgactcagccaccctcagtgtcagtcgccccgggaaagacggccactcttacgtgtgggggagacatcattagaactaacagtgtgaactggtaccagcagaagccaggccaggcccctgtattgatcatatattatgatagcgaccggccctcagggatccctgggcgattctctgcctccaactctgggagcgcggccaccctgaccatcagcagggtcgaagccggggatgaggccgactattactgtcaggtgtgggacagcagtactgattatcacgtggttttcggcggagggaccaagctcaccgtccta

SEQ ID NO: 1722 - protein, 109 aa, Artificial Sequence
  source: /note="Description of Artificial Sequence: Synthetic light chain variable region"
QPVLTQPPSVSVAPGKTATLTCGGDIIRTNSVNWYQQKPGQAPVLIIYYDSDRPSGIPGRFSASNSGSAATLTISRVEAGDEADYYCQVWDSSTDYHVVFGGGTKLTVL

SEQ ID NO: 1723 - protein, 11 aa, Artificial Sequence
  source: /note="Description of Artificial Sequence: Synthetic light chain variable region CDR L1"
GGDIIRTNSVN

SEQ ID NO: 1724 - DNA, 33 bp, Artificial Sequence
  source: /note="Description of Artificial Sequence: Synthetic light chain variable region CDR L1"
gggggagacatcattagaactaacagtgtgaac

SEQ ID NO: 1725 - protein, 7 aa, Artificial Sequence
  source: /note="Description of Artificial Sequence: Synthetic light chain variable region CDR L2"
YDSDRPS

SEQ ID NO: 1726 - DNA, 21 bp, Artificial Sequence
  source: /note="Description of Artificial Sequence: Synthetic light chain variable region CDR L2"
tatgatagcgaccggccctca

SEQ ID NO: 1727 - protein, 12 aa, Artificial Sequence
  source: /note="Description of Artificial Sequence: Synthetic light chain variable region CDR L3"
QVWDSSTDYHVV

SEQ ID NO: 1728 - DNA, 36 bp, Artificial Sequence
  source: /note="Description of Artificial Sequence: Synthetic light chain variable region CDR L3"
caggtgtgggacagcagtactgattatcacgtggtt

SEQ ID NO: 1729 - DNA, 390 bp, Artificial Sequence
  source: /note="Description of Artificial Sequence: Synthetic heavy chain variable region"
caggtccagctggtacagtctggggctgaggtgaagaagcctggggcctcagtgaaggtttcctgcaaggcatctggatacatcttcaccggttattttatacactgggtgcgacaggcccccggacaagggcttgagtggatgggagtaatcaatcccagaggtggaagcacaagctacgcacaaaagttccagggcagagtcgctgtgtccagggacacgtccacgactacagtctacatggagctgaacagcctgagatctgaggacacggccgtatattactgtgcgagagccccgagccacgatgagtgggtcgcaatttcccgaaataacgatgttgtggggttcgacgcctggggccagggaaccctggtcaccgtctcctca

SEQ ID NO: 1730 - protein, 130 aa, Artificial Sequence
  source: /note="Description of Artificial Sequence: Synthetic heavy chain variable region"
QVQLVQSGAEVKKPGASVKVSCKASGYIFTGYFIHWVRQAPGQGLEWMGVINPRGGSTSYAQKFQGRVAVSRDTSTTTVYMELNSLRSEDTAVYYCARAPSHDEWVAISRNNDVVGFDAWGQGTLVTVSS

SEQ ID NO: 1731 - protein, 9 aa, Artificial Sequence
  source: /note="Description of Artificial Sequence: Synthetic heavy chain variable region CDR H1"
YIFTGYFIH

SEQ ID NO: 1732 - DNA, 27 bp, Artificial Sequence
  source: /note="Description of Artificial Sequence: Synthetic heavy chain variable region CDR H1"
tacatcttcaccggttattttatacac

SEQ ID NO: 1733 - protein, 17 aa, Artificial Sequence
  source: /note="Description of Artificial Sequence: Synthetic heavy chain variable region CDR H2"
VINPRGGSTSYAQKFQG

SEQ ID NO: 1734 - DNA, 51 bp, Artificial Sequence
  source: /note="Description of Artificial Sequence: Synthetic heavy chain variable region CDR H2"
gtaatcaatcccagaggtggaagcacaagctacgcacaaaagttccagggc

SEQ ID NO: 1735 - protein, 23 aa, Artificial Sequence
  source: /note="Description of Artificial Sequence: Synthetic heavy chain variable region CDR H3"
ARAPSHDEWVAISRNNDVVGFDA

SEQ ID NO: 1736 - DNA, 69 bp, Artificial Sequence
  source: /note="Description of Artificial Sequence: Synthetic heavy chain variable region CDR H3"
gcgagagccccgagccacgatgagtgggtcgcaatttcccgaaataacgatgttgtggggttcgacgcc

SEQ ID NO: 1737 - DNA, 333 bp, Artificial Sequence
  source: /note="Description of Artificial Sequence: Synthetic light chain variable region"
cagtctgtcctgactcagccgccctcagtgtctggggccccagggcagagggtcaccatctcctgcactgggggcagctccaacatcggggcagattatgacgtacactggtaccagcagcctccaggaacagcccccaaactcctcatatttgctaacaacaatcgaccctcaggggtccctggccgattctctggctccaagtctggcacctcagcctccctggccatcactgggctccaggctgaggatgaggctgattattactgccagtcctatgacagcagcctgagtgcttgggtgttcggcggggggaccaagctgaccgtccta

SEQ ID NO: 1738 - protein, 111 aa, Artificial Sequence
  source: /note="Description of Artificial Sequence: Synthetic light chain variable region"
QSVLTQPPSVSGAPGQRVTISCTGGSSNIGADYDVHWYQQPPGTAPKLLIFANNNRPSGVPGRFSGSKSGTSASLAITGLQAEDEADYYCQSYDSSLSAWVFGGGTKLTVL

SEQ ID NO: 1739 - protein, 14 aa, Artificial Sequence
  source: /note="Description of Artificial Sequence: Synthetic light chain variable region CDR L1"
TGGSSNIGADYDVH

SEQ ID NO: 1740 - DNA, 42 bp, Artificial Sequence
  source: /note="Description of Artificial Sequence: Synthetic light chain variable region CDR L1"
actgggggcagctccaacatcggggcagattatgacgtacac

SEQ ID NO: 1741 - protein, 7 aa, Artificial Sequence
  source: /note="Description of Artificial Sequence: Synthetic light chain variable region CDR L2"
ANNNRPS

SEQ ID NO: 1742 - DNA, 21 bp, Artificial Sequence
  source: /note="Description of Artificial Sequence: Synthetic light chain variable region CDR L2"
gctaacaacaatcgaccctca

SEQ ID NO: 1743 - protein, 11 aa, Artificial Sequence
  source: /note="Description of Artificial Sequence: Synthetic light chain variable region CDR L3"
QSYDSSLSAWV

SEQ ID NO: 1744 - DNA, 33 bp, Artificial Sequence
  source: /note="Description of Artificial Sequence: Synthetic light chain variable region CDR L3"
cagtcctatgacagcagcctgagtgcttgggtg

SEQ ID NO: 1745 - DNA, 372 bp, Artificial Sequence
  source: /note="Description of Artificial Sequence: Synthetic heavy chain variable region"
gaggtgcagctggtggagtctgggggaggcctggtcaagcctggggggtccctgagactctcctgtgcagcctctggattcaccctcagtagttatgccatgaactgggtccgccaggctccagggaagggtctggagtgggtctcatccattagtgctggaagtagttacatcgactacgcagactcagtgaagggccgattcaccatctccagagacaacgccaagaactctctgtatctgcaaatgaacaacctgagagccgaggacacggctctgtattactgtgcgagagaagttttaccagcaaccgctataggaggcgcctggctcgacccctggggccagggaaccctggtcactgtctcctca

SEQ ID NO: 1746 - protein, 124 aa, Artificial Sequence
  source: /note="Description of Artificial Sequence: Synthetic heavy chain variable region"
EVQLVESGGGLVKPGGSLRLSCAASGFTLSSYAMNWVRQAPGKGLEWVSSISAGSSYIDYADSVKGRFTISRDNAKNSLYLQMNNLRAEDTALYYCAREVLPATAIGGAWLDPWGQGTLVTVSS

SEQ ID NO: 1747 - protein, 9 aa, Artificial Sequence
  source: /note="Description of Artificial Sequence: Synthetic heavy chain variable region CDR H1"
FTLSSYAMN

SEQ ID NO: 1748 - DNA, 27 bp, Artificial Sequence
  source: /note="Description of Artificial Sequence: Synthetic heavy chain variable region CDR H1"
ttcaccctcagtagttatgccatgaac

SEQ ID NO: 1749 - protein, 17 aa, Artificial Sequence
  source: /note="Description of Artificial Sequence: Synthetic heavy chain variable region CDR H2"
SISAGSSYIDYADSVKG

SEQ ID NO: 1750 - DNA, 51 bp, Artificial Sequence
  source: /note="Description of Artificial Sequence: Synthetic heavy chain variable region CDR H2"
tccattagtgctggaagtagttacatcgactacgcagactcagtgaagggc

SEQ ID NO: 1751 - protein, 17 aa, Artificial Sequence
  source: /note="Description of Artificial Sequence: Synthetic heavy chain variable region CDR H3"
AREVLPATAIGGAWLDP

SEQ ID NO: 1752 - DNA, 51 bp, Artificial Sequence
  source: /note="Description of Artificial Sequence: Synthetic heavy chain variable region CDR H3"
gcgagagaagttttaccagcaaccgctataggaggcgcctggctcgacccc

SEQ ID NO: 1753 - DNA, 336 bp, Artificial Sequence
  source: /note="Description of Artificial Sequence: Synthetic light chain variable region"
cagtctgtcctgacgcagccgccctcagtgtctggggccccagggcagacggtcaccatctcctgcactgggagcagctccaacatcggggctggatatgatgtccactggtaccggcagcttccaggaacagcccccaaactcctcatctattctaacaacaatcggccctcaggggtccctgaccgattctctggctccaagtctgacacctcagcctccctggccatcactgggctccaggctggggatgaggctgattattactgccagtcctatgacatcagcctgagtgcctcttatgtcttcggaactgggaccaaggtcaccgtccta

SEQ ID NO: 1754 - protein, 112 aa, Artificial Sequence
  source: /note="Description of Artificial Sequence: Synthetic light chain variable region"
QSVLTQPPSVSGAPGQTVTISCTGSSSNIGAGYDVHWYRQLPGTAPKLLIYSNNNRPSGVPDRFSGSKSDTSASLAITGLQAGDEADYYCQSYDISLSASYVFGTGTKVTVL

SEQ ID NO: 1755 - protein, 14 aa, Artificial Sequence
  source: /note="Description of Artificial Sequence: Synthetic light chain variable region CDR L1"
TGSSSNIGAGYDVH

SEQ ID NO: 1756 - DNA, 42 bp, Artificial Sequence
  source: /note="Description of Artificial Sequence: Synthetic light chain variable region CDR L1"
actgggagcagctccaacatcggggctggatatgatgtccac

SEQ ID NO: 1757 - protein, 7 aa, Artificial Sequence
  source: /note="Description of Artificial Sequence: Synthetic light chain variable region CDR L2"
SNNNRPS

SEQ ID NO: 1758 - DNA, 21 bp, Artificial Sequence
  source: /note="Description of Artificial Sequence: Synthetic light chain variable region CDR L2"
tctaacaacaatcggccctca

SEQ ID NO: 1759 - protein, 12 aa, Artificial Sequence
  source: /note="Description of Artificial Sequence: Synthetic light chain variable region CDR L3"
QSYDISLSASYV

SEQ ID NO: 1760 - DNA, 36 bp, Artificial Sequence
  source: /note="Description of Artificial Sequence: Synthetic light chain variable region CDR L3"
cagtcctatgacatcagcctgagtgcctcttatgtc

SEQ ID NO: 1761 - DNA, 369 bp, Artificial Sequence
  source: /note="Description of Artificial Sequence: Synthetic heavy chain variable region"
caggtccagctggtgcagtctggagctgaggtgaagaagcctggggcctcagtgaaggtctcctgcaaggcttctggttacacctttaccaactatggtttcagctgggtgcgacaggcccctggacaagggcttgagtggatgggatggatcctcactcacaatggttacacaaactatgcacagaagttccaggacagagtcaccatgaagacagacacatccacgagcacagtctacatggagctgaggagcctgagatctgtcgacacggccgtgtattactgtgcgagaattggccatgttacagccgtggctggtgcccctcctgactactggggccagggaaccctggtcaccgtctcctca

SEQ ID NO: 1762 - protein, 123 aa, Artificial Sequence
  source: /note="Description of Artificial Sequence: Synthetic heavy chain variable region"
QVQLVQSGAEVKKPGASVKVSCKASGYTFTNYGFSWVRQAPGQGLEWMGWILTHNGYTNYAQKFQDRVTMKTDTSTSTVYMELRSLRSVDTAVYYCARIGHVTAVAGAPPDYWGQGTLVTVSS

SEQ ID NO: 1763 - protein, 9 aa, Artificial Sequence
  source: /note="Description of Artificial Sequence: Synthetic heavy chain variable region CDR H1"
YTFTNYGFS

SEQ ID NO: 1764 - DNA, 27 bp, Artificial Sequence
  source: /note="Description of Artificial Sequence: Synthetic heavy chain variable region CDR H1"
tacacctttaccaactatggtttcagc

SEQ ID NO: 1765 - protein, 17 aa, Artificial Sequence
  source: /note="Description of Artificial Sequence: Synthetic heavy chain variable region CDR H2"
WILTHNGYTNYAQKFQD

SEQ ID NO: 1766 - DNA, 51 bp, Artificial Sequence
  source: /note="Description of Artificial Sequence: Synthetic heavy chain variable region CDR H2"
tggatcctcactcacaatggttacacaaactatgcacagaagttccaggac

SEQ ID NO: 1767 - protein, 16 aa, Artificial Sequence
  source: /note="Description of Artificial Sequence: Synthetic heavy chain variable region CDR H3"
ARIGHVTAVAGAPPDY

SEQ ID NO: 1768 - DNA, 48 bp, Artificial Sequence
  source: /note="Description of Artificial Sequence: Synthetic heavy chain variable region CDR H3"
gcgagaattggccatgttacagccgtggctggtgcccctcctgactac

SEQ ID NO: 1769 - DNA, 330 bp, Artificial Sequence
  source: /note="Description of Artificial Sequence: Synthetic light chain variable region"
cagcctgtgctgactcagcctgcctccgtgtctgggtatcaaggacagtcgatcaccatctcctgcagtggaaccagcagtgatgttgggacttataaccttgtctcctggtaccaacaacacccaggcaaagcccccgaactcatgatttatgagggcagtaagcggccctcaggggtttctgatcgcttctctggctccaagtctggcaacacggcctccctgacaatctctgggctccaggctgaggacgaggctgattattactgctgctcatatgtagctggtagtacttcagtattcggcggagggaccaagctcaccgtccta

SEQ ID NO: 1770 - protein, 110 aa, Artificial Sequence
  source: /note="Description of Artificial Sequence: Synthetic light chain variable region"
QPVLTQPASVSGYQGQSITISCSGTSSDVGTYNLVSWYQQHPGKAPELMIYEGSKRPSGVSDRFSGSKSGNTASLTISGLQAEDEADYYCCSYVAGSTSVFGGGTKLTVL

SEQ ID NO: 1771 - protein, 14 aa, Artificial Sequence
  source: /note="Description of Artificial Sequence: Synthetic light chain variable region CDR L1"
SGTSSDVGTYNLVS

SEQ ID NO: 1772 - DNA, 42 bp, Artificial Sequence
  source: /note="Description of Artificial Sequence: Synthetic light chain variable region CDR L1"
agtggaaccagcagtgatgttgggacttataaccttgtctcc

SEQ ID NO: 1773 - protein, 7 aa, Artificial Sequence
  source: /note="Description of Artificial Sequence: Synthetic light chain variable region CDR L2"
EGSKRPS

SEQ ID NO: 1774 - DNA, 21 bp, Artificial Sequence
  source: /note="Description of Artificial Sequence: Synthetic light chain variable region CDR L2"
gagggcagtaagcggccctca

SEQ ID NO: 1775 - protein, 10 aa, Artificial Sequence
  source: /note="Description of Artificial Sequence: Synthetic light chain variable region CDR L3"
CSYVAGSTSV

SEQ ID NO: 1776 - DNA, 30 bp, Artificial Sequence
  source: /note="Description of Artificial Sequence: Synthetic light chain variable region CDR L3"
tgctcatatgtagctggtagtacttcagta

SEQ ID NO: 1777 - DNA, 369 bp, Artificial Sequence
  source: /note="Description of Artificial Sequence: Synthetic heavy chain variable region"
gaggtgcagctggtggagtcgggccctggactggtgaagccttcagagaccctgtccctcagttgcattgtctctggtggctccatcaccagtggtgattactactggagttggctccgccagtccccagggaagggcctggagtggattgggtacatatatcacagcggggccaccttctacaccccgtccctacggagtcgagtgaccatttcgacagacacctccaagaaccaattctccctgagactgtcgtctgtgaccgccgcagacacggccgtttattattgtgccagtggacctgtcgggatggctacaagcaactggttcgacccctggggccagggaaccctggtcaccgtctcctca

SEQ ID NO: 1778 - protein, 123 aa, Artificial Sequence
  source: /note="Description of Artificial Sequence: Synthetic heavy chain variable region"
EVQLVESGPGLVKPSETLSLSCIVSGGSITSGDYYWSWLRQSPGKGLEWIGYIYHSGATFYTPSLRSRVTISTDTSKNQFSLRLSSVTAADTAVYYCASGPVGMATSNWFDPWGQGTLVTVSS

SEQ ID NO: 1779 - protein, 11 aa, Artificial Sequence
  source: /note="Description of Artificial Sequence: Synthetic heavy chain variable region CDR H1"
GSITSGDYYWS

SEQ ID NO: 1780 - DNA, 33 bp, Artificial Sequence
  source: /note="Description of Artificial Sequence: Synthetic heavy chain variable region CDR H1"
ggctccatcaccagtggtgattactactggagt

SEQ ID NO: 1781 - protein, 16 aa, Artificial Sequence
  source: /note="Description of Artificial Sequence: Synthetic heavy chain variable region CDR H2"
YIYHSGATFYTPSLRS

SEQ ID NO: 1782 - DNA, 48 bp, Artificial Sequence
  source: /note="Description of Artificial Sequence: Synthetic heavy chain variable region CDR H2"
tacatatatcacagcggggccaccttctacaccccgtccctacggagt

SEQ ID NO: 1783 - protein, 15 aa, Artificial Sequence
  source: /note="Description of Artificial Sequence: Synthetic heavy chain variable region CDR H3"
ASGPVGMATSNWFDP

SEQ ID NO: 1784 - DNA, 45 bp, Artificial Sequence
  source: /note="Description of Artificial Sequence: Synthetic heavy chain variable region CDR H3"
gccagtggacctgtcgggatggctacaagcaactggttcgacccc

SEQ ID NO: 1785 - DNA, 327 bp, Artificial Sequence
  source: /note="Description of Artificial Sequence: Synthetic light chain variable region"
tcctatgagctgacacagccaccctcagtatcagtcgccccgggaaagacggccaccattacgtgtgggggagacatcattagaactaacagtgtgaactggtaccagcagaagccaggccaggcccctctattgctcatctattatgatagcgaccggccctcagggatccctgagcgattctctgcctccaactctgggaacacggccaccctgaccatcagcagggtcgaggccggggatgaggccgactattactgtcaggtgtgggacagtggtactgattatcacgtggttttcggcggagggaccaagctgaccgtccaa

SEQ ID NO: 1786 - protein, 109 aa, Artificial Sequence
  source: /note="Description of Artificial Sequence: Synthetic light chain variable region"
SYELTQPPSVSVAPGKTATITCGGDIIRTNSVNWYQQKPGQAPLLLIYYDSDRPSGIPERFSASNSGNTATLTISRVEAGDEADYYCQVWDSGTDYHVVFGGGTKLTVQ

SEQ ID NO: 1787 - protein, 11 aa, Artificial Sequence
  source: /note="Description of Artificial Sequence: Synthetic light chain variable region CDR L1"
GGDIIRTNSVN

SEQ ID NO: 1788 - DNA, 33 bp, Artificial Sequence; identical to SEQ ID NO: 1724
  source: /note="Description of Artificial Sequence: Synthetic light chain variable region CDR L1"

SEQ ID NO: 1789 - protein, 7 aa, Artificial Sequence
  source: /note="Description of Artificial Sequence: Synthetic light chain variable region CDR L2"
YDSDRPS

SEQ ID NO: 1790 - DNA, 21 bp, Artificial Sequence
  source: /note="Description of Artificial Sequence: Synthetic light chain variable region CDR L2"
tatgatagcgaccggccctca

SEQ ID NO: 1791 - protein, 12 aa, Artificial Sequence
  source: /note="Description of Artificial Sequence: Synthetic light chain variable region CDR L3"
QVWDSGTDYHVV

SEQ ID NO: 1792 - DNA, 36 bp, Artificial Sequence
  source: /note="Description of Artificial Sequence: Synthetic light chain variable region CDR L3"
caggtgtgggacagtggtactgattatcacgtggtt

SEQ ID NO: 1793 - DNA, 363 bp, Artificial Sequence
  source: /note="Description of Artificial Sequence: Synthetic heavy chain variable region"
caggtccagctggtacagtctggggctgaggtgaagaggcctggggcctcagtgaaagtctcctgcaaggcttctgaatacgccttcaccgcccactatcttcactgggtgcgacaggcccctgatcaaggacttgagtggatgggatggatcagccctaaaagtggtggcaccaactatgcacagaagtttcacggcagggtcagcatgaccagtgacacgtccatcagtacagtctatatggaactgagcagcctgacatctgacgacacggccgtctattactgtgcgagaagcagtctggtgggagcaagccccaactttgacttctggggccagggaaccctggtcaccgtctcctca

SEQ ID NO: 1794 - protein, 121 aa, Artificial Sequence
  source: /note="Description of Artificial Sequence: Synthetic heavy chain variable region"
QVQLVQSGAEVKRPGASVKVSCKASEYAFTAHYLHWVRQAPDQGLEWMGWISPKSGGTNYAQKFHGRVSMTSDTSISTVYMELSSLTSDDTAVYYCARSSLVGASPNFDFWGQGTLVTVSS

SEQ ID NO: 1795 - protein, 9 aa, Artificial Sequence
  source: /note="Description of Artificial Sequence: Synthetic heavy chain variable region CDR H1"
YAFTAHYLH

SEQ ID NO: 1796 - DNA, 27 bp, Artificial Sequence
  source: /note="Description of Artificial Sequence: Synthetic heavy chain variable region CDR H1"
tacgccttcaccgcccactatcttcac

SEQ ID NO: 1797 - protein, 17 aa, Artificial Sequence
  source: /note="Description of Artificial Sequence: Synthetic heavy chain variable region CDR H2"
WISPKSGGTNYAQKFHG

SEQ ID NO: 1798 - DNA, 51 bp, Artificial Sequence; identical to SEQ ID NO: 390
  source: /note="Description of Artificial Sequence: Synthetic heavy chain variable region CDR H2"

SEQ ID NO: 1799 - protein, 14 aa, Artificial Sequence
  source: /note="Description of Artificial Sequence: Synthetic heavy chain variable region CDR H3"
ARSSLVGASPNFDF

SEQ ID NO: 1800 - DNA, 42 bp, Artificial Sequence; identical to SEQ ID NO: 392
  source: /note="Description of Artificial Sequence: Synthetic heavy chain variable region CDR H3"

SEQ ID NO: 1801 - DNA, 333 bp, Artificial Sequence
  source: /note="Description of Artificial Sequence: Synthetic light chain variable region"
cagtctgtggtgacgcagccgccctcagtgtctgcggccccaggacagagggtcaccatctcctgctctggaagcagctccaacattgggaataattatgtatcctggtaccagcaactcccaggatctacccccaaagtcctcatttacgacaataatcagcgaccctcagggattcctgaccgtttctctggctccaagtctggcacgtcagccaccctggccatcagcggactccagactggcgacgaggccgtctattattgcggaacatgggatgccagcctgagtgctgcaatggttttcggcggggggaccaagctcaccgtccta

SEQ ID NO: 1802 - protein, 111 aa, Artificial Sequence
  source: /note="Description of Artificial Sequence: Synthetic light chain variable region"
QSVVTQPPSVSAAPGQRVTISCSGSSSNIGNNYVSWYQQLPGSTPKVLIYDNNQRPSGIPDRFSGSKSGTSATLAISGLQTGDEAVYYCGTWDASLSAAMVFGGGTKLTVL

SEQ ID NO: 1803 - protein, 13 aa, Artificial Sequence
  source: /note="Description of Artificial Sequence: Synthetic light chain variable region CDR L1"
SGSSSNIGNNYVS

SEQ ID NO: 1804 - DNA, 39 bp, Artificial Sequence; identical to SEQ ID NO: 396
  source: /note="Description of Artificial Sequence: Synthetic light chain variable region CDR L1"

SEQ ID NO: 1805 - protein, 7 aa, Artificial Sequence
  source: /note="Description of Artificial Sequence: Synthetic light chain variable region CDR L2"
DNNQRPS

SEQ ID NO: 1806 - DNA, 21 bp, Artificial Sequence
  source: /note="Description of Artificial Sequence: Synthetic light chain variable region CDR L2"
gacaataatcagcgaccctca

SEQ ID NO: 1807 - protein, 12 aa, Artificial Sequence
  source: /note="Description of Artificial Sequence: Synthetic light chain variable region CDR L3"
GTWDASLSAAMV

SEQ ID NO: 1808 - DNA, 36 bp, Artificial Sequence
  source: /note="Description of Artificial Sequence: Synthetic light chain variable region CDR L3"
ggaacatgggatgccagcctgagtgctgcaatggtt

SEQ ID NO: 1809 - DNA, 366 bp, Artificial Sequence
  source: /note="Description of Artificial Sequence: Synthetic heavy chain variable region"
caggtgcagctacagcagtggggcgcaggactgttgaagccttcggagaccctgtccctaacctgcgctgtctctggtgggtacttcattaatgacaactggagctggatccgccagtccccagggaaggggctggagtggattggagaaattagtcatagtggaagcaccaactacaatccgtccctcaagagtcgactcaccatatcagttgacacgtccaggcagcagttttccctgaaattgagctctgtgaccgccgcggacagtggtgtttactactgtgcgcgagtccacccgtcgtatgactttggctggcgcttctttgacttctggggccagggaaccctggtcaccgtctcttca

SEQ ID NO: 1810 - protein, 122 aa, Artificial Sequence
  source: /note="Description of Artificial Sequence: Synthetic heavy chain variable region"
QVQLQQWGAGLLKPSETLSLTCAVSGGYFINDNWSWIRQSPGKGLEWIGEISHSGSTNYNPSLKSRLTISVDTSRQQFSLKLSSVTAADSGVYYCARVHPSYDFGWRFFDFWGQGTLVTVSS

SEQ ID NO: 1811 - protein, 9 aa, Artificial Sequence
  source: /note="Description of Artificial Sequence: Synthetic heavy chain variable region CDR H1"
GYFINDNWS

SEQ ID NO: 1812 - DNA, 27 bp, Artificial Sequence
  source: /note="Description of Artificial Sequence: Synthetic heavy chain variable region CDR H1"
gggtacttcattaatgacaactggagc

SEQ ID NO: 1813 - protein, 16 aa, Artificial Sequence
  source: /note="Description of Artificial Sequence: Synthetic heavy chain variable region CDR H2"
EISHSGSTNYNPSLKS

SEQ ID NO: 1814 - DNA, 48 bp, Artificial Sequence
  source: /note="Description of Artificial Sequence: Synthetic heavy chain variable region CDR H2"
gaaattagtcatagtggaagcaccaactacaatccgtccctcaagagt

SEQ ID NO: 1815 - protein, 16 aa, Artificial Sequence
  source: /note="Description of Artificial Sequence: Synthetic heavy chain variable region CDR H3"
ARVHPSYDFGWRFFDF

SEQ ID NO: 1816 - DNA, 48 bp, Artificial Sequence
  source: /note="Description of Artificial Sequence: Synthetic heavy chain variable region CDR H3"
gcgcgagtccacccgtcgtatgactttggctggcgcttctttgacttc

SEQ ID NO: 1817 - DNA, 324 bp, Artificial Sequence
  source: /note="Description of Artificial Sequence: Synthetic light chain variable region"
gaaacgacactcacgcagtctccagccaccctgtctgtgtctccaggggatacagccaccctctcctgcagggccagtcagactattagttccaacttagcctggtaccagcagaaacctggccagcctcccagtctcctcatctatggagcatccaacagggccactggtatcccagacaggtttcgtggcagtgggtctgggacagagttcactctcaccatcagcagcctgcagtctgaagattttgcagtttattactgtcagcagtatgcatactggcctccgtacacttttggccaggggaccaaggtggagatcaaa

SEQ ID NO: 1818 - protein, 108 aa, Artificial Sequence
  source: /note="Description of Artificial Sequence: Synthetic light chain variable region"
ETTLTQSPATLSVSPGDTATLSCRASQTISSNLAWYQQKPGQPPSLLIYGASNRATGIPDRFRGSGSGTEFTLTISSLQSEDFAVYYCQQYAYWPPYTFGQGTKVEIK

SEQ ID NO: 1819 - protein, 11 aa, Artificial Sequence
  source: /note="Description of Artificial Sequence: Synthetic light chain variable region CDR L1"
RASQTISSNLA

SEQ ID NO: 1820 - DNA, 33 bp, Artificial Sequence
  source: /note="Description of Artificial Sequence: Synthetic light chain variable region CDR L1"
agggccagtcagactattagttccaacttagcc

SEQ ID NO: 1821 - protein, 7 aa, Artificial Sequence
  source: /note="Description of Artificial Sequence: Synthetic light chain variable region CDR L2"
GASNRAT

SEQ ID NO: 1822 - DNA, 21 bp, Artificial Sequence
  source: /note="Description of Artificial Sequence: Synthetic light chain variable region CDR L2"
ggagcatccaacagggccact

SEQ ID NO: 1823 - protein, 10 aa, Artificial Sequence
  source: /note="Description of Artificial Sequence: Synthetic light chain variable region CDR L3"
QQYAYWPPYT

SEQ ID NO: 1824 - DNA, 30 bp, Artificial Sequence
  source: /note="Description of Artificial Sequence: Synthetic light chain variable region CDR L3"
cagcagtatgcatactggcctccgtacact

SEQ ID NO: 1825 - DNA, 369 bp, Artificial Sequence
  source: /note="Description of Artificial Sequence: Synthetic heavy chain variable region"
gaggtgcagctgttggagtcgggcccaggactggtgaagccttcacagaccctgtccctcacctgcactgtctcgggtggctccatcaacagtattgattattattggagctggatccgccagcccccagggaagggcctggagtggattggctacatttatcacagtgggagcacccactacagaccatccctcaagagtcgagtaacgatatcattagacaaggccaagaacgagttctcgctgagtctgacctctgtgactgccgcagacacggccgtgtatttctgtgccagtggccccgtcgggatggcaacaagcaactggttcgacccctggggccagggaaccctggtcaccgtctcctca

SEQ ID NO: 1826 - protein, 123 aa, Artificial Sequence
  source: /note="Description of Artificial Sequence: Synthetic heavy chain variable region"
EVQLLESGPGLVKPSQTLSLTCTVSGGSINSIDYYWSWIRQPPGKGLEWIGYIYHSGSTHYRPSLKSRVTISLDKAKNEFSLSLTSVTAADTAVYFCASGPVGMATSNWFDPWGQGTLVTVSS

SEQ ID NO: 1827 - protein, 11 aa, Artificial Sequence
  source: /note="Description of Artificial Sequence: Synthetic heavy chain variable region CDR H1"
GSINSIDYYWS

SEQ ID NO: 1828 - DNA, 33 bp, Artificial Sequence
  source: /note="Description of Artificial Sequence: Synthetic heavy chain variable region CDR H1"
ggctccatcaacagtattgattattattggagc

SEQ ID NO: 1829 - protein, 16 aa, Artificial Sequence
  source: /note="Description of Artificial Sequence: Synthetic heavy chain variable region CDR H2"
YIYHSGSTHYRPSLKS

SEQ ID NO: 1830 - DNA, 48 bp, Artificial Sequence
  source: /note="Description of Artificial Sequence: Synthetic heavy chain variable region CDR H2"
tacatttatcacagtgggagcacccactacagaccatccctcaagagt

SEQ ID NO: 1831 - protein, 15 aa, Artificial Sequence
  source: /note="Description of Artificial Sequence: Synthetic heavy chain variable region CDR H3"
ASGPVGMATSNWFDP

SEQ ID NO: 1832 - DNA, 45 bp, Artificial Sequence
  source: /note="Description of Artificial Sequence: Synthetic heavy chain variable region CDR H3"
gccagtggccccgtcgggatggcaacaagcaactggttcgacccc

SEQ ID NO: 1833 - DNA, 327 bp, Artificial Sequence
  source: /note="Description of Artificial Sequence: Synthetic light chain variable region"
cagcctgtgctgactcagccaccctcagtgtcagtgaccccaggagagacggccaggcttccctgtgagggagacatcgttgtcactaacagtgtccactggtaccagcagaagccaggccaggcccctgttttggtcgtctattatgatagcgaccgggcctcagggatccctgagcgattctctggctccaattctgggaacacggccaccctgagcatcagcagggtcgaagccggggatgaggccgactactattgtcaggtgtgggatagtagtactgatcatcatgtggtgttcggcggtgggaccaagctcaccgtccta

SEQ ID NO: 1834 - protein, 109 aa, Artificial Sequence
  source: /note="Description of Artificial Sequence: Synthetic light chain variable region"
QPVLTQPPSVSVTPGETARLPCEGDIVVTNSVHWYQQKPGQAPVLVVYYDSDRASGIPERFSGSNSGNTATLSISRVEAGDEADYYCQVWDSSTDHHVVFGGGTKLTVL

SEQ ID NO: 1835 - protein, 11 aa, Artificial Sequence
  source: /note="Description of Artificial Sequence: Synthetic light chain variable region CDR L1"
EGDIVVTNSVH

SEQ ID NO: 1836 - DNA, 33 bp, Artificial Sequence
  source: /note="Description of Artificial Sequence: Synthetic light chain variable region CDR L1"
gagggagacatcgttgtcactaacagtgtccac

SEQ ID NO: 1837 - protein, 7 aa, Artificial Sequence
  source: /note="Description of Artificial Sequence: Synthetic light chain variable region CDR L2"
YDSDRAS

SEQ ID NO: 1838 - DNA, 21 bp, Artificial Sequence
  source: /note="Description of Artificial Sequence: Synthetic light chain variable region CDR L2"
tatgatagcgaccgggcctca

SEQ ID NO: 1839 - protein, 12 aa, Artificial Sequence
  source: /note="Description of Artificial Sequence: Synthetic light chain variable region CDR L3"
QVWDSSTDHHVV

SEQ ID NO: 1840 - DNA, 36 bp, Artificial Sequence
  source: /note="Description of Artificial Sequence: Synthetic light chain variable region CDR L3"
caggtgtgggatagtagtactgatcatcatgtggtg

SEQ ID NO: 1841 - DNA, 372 bp, Artificial Sequence
  source: /note="Description of Artificial Sequence: Synthetic heavy chain variable region"
caggtccagctggtgcagtctggggctgaggtgaagaagcctgggtcctcggtgaaggtctcctgcaaggcttctggaggcagattcagcagcgacgctatcagctgggtgcgacaggcccctggacaagggcttgagtggatgggaggaatcatccctatccgtgggacaccaacctacgcacagaagttccagggcagagtcacgattatcgcggacgaatccacgactacatcctacatggagatgagcagcctgagatctgaggacacggccgtgtattactgtgcgagaccgaattacgatattttgactggttataatgatgcttttgatatttggggccaagggacaatggtcaccgtctcttca

SEQ ID NO: 1842 - protein, 124 aa, Artificial Sequence
  source: /note="Description of Artificial Sequence: Synthetic heavy chain variable region"
QVQLVQSGAEVKKPGSSVKVSCKASGGRFSSDAISWVRQAPGQGLEWMGGIIPIRGTPTYAQKFQGRVTIIADESTTTSYMEMSSLRSEDTAVYYCARPNYDILTGYNDAFDIWGQGTMVTVSS

SEQ ID NO: 1843 - protein, 9 aa, Artificial Sequence
  source: /note="Description of Artificial Sequence: Synthetic heavy chain variable region CDR H1"
GRFSSDAIS

SEQ ID NO: 1844 - DNA, 27 bp, Artificial Sequence
  source: /note="Description of Artificial Sequence: Synthetic heavy chain variable region CDR H1"
ggcagattcagcagcgacgctatcagc

SEQ ID NO: 1845 - protein, 17 aa, Artificial Sequence
  source: /note="Description of Artificial Sequence: Synthetic heavy chain variable region CDR H2"
GIIPIRGTPTYAQKFQG

SEQ ID NO: 1846 - DNA, 51 bp, Artificial Sequence
  source: /note="Description of Artificial Sequence: Synthetic heavy chain variable region CDR H2"
ggaatcatccctatccgtgggacaccaacctacgcacagaagttccagggc

SEQ ID NO: 1847 - protein, 17 aa, Artificial Sequence
  source: /note="Description of Artificial Sequence: Synthetic heavy chain variable region CDR H3"
ARPNYDILTGYNDAFDI

SEQ ID NO: 1848 - DNA, 51 bp, Artificial Sequence
  source: /note="Description of Artificial Sequence: Synthetic heavy chain variable region CDR H3"
gcgagaccgaattacgatattttgactggttataatgatgcttttgatatt

SEQ ID NO: 1849 - DNA, 327 bp, Artificial Sequence
  source: /note="Description of Artificial Sequence: Synthetic light chain variable region"
cagtctgtgttgacgcagcctcgctcagtgtccgggtctcctggacagtcagtcaccatctcctgcactggaaccagcagtgatgttggtggttataactatgtctcctggtaccaacagcacccaggcaaagtccccagactcatgatttacgatgtcagtaagcggccctcaggggcccctgatcgcttctctggctccaagtctggcaacacggcctccctgaccatctctgggctccaggctgaggatgaggctgattattactgctgctcatatgcaggcggcctttatgtcttcggaactgggaccaagctcaccgtccta

SEQ ID NO: 1850 - protein, 109 aa, Artificial Sequence
  source: /note="Description of Artificial Sequence: Synthetic light chain variable region"
QSVLTQPRSVSGSPGQSVTISCTGTSSDVGGYNYVSWYQQHPGKVPRLMIYDVSKRPSGAPDRFSGSKSGNTASLTISGLQAEDEADYYCCSYAGGLYVFGTGTKLTVL

SEQ ID NO: 1851 - protein, 14 aa, Artificial Sequence
  source: /note="Description of Artificial Sequence: Synthetic light chain variable region CDR L1"
TGTSSDVGGYNYVS

SEQ ID NO: 1852 - DNA, 42 bp, Artificial Sequence
  source: /note="Description of Artificial Sequence: Synthetic light chain variable region CDR L1"
actggaaccagcagtgatgttggtggttataactatgtctcc

SEQ ID NO: 1853 - protein, 7 aa, Artificial Sequence
  source: /note="Description of Artificial Sequence: Synthetic light chain variable region CDR L2"
DVSKRPS

SEQ ID NO: 1854 - DNA, 21 bp, Artificial Sequence
  source: /note="Description of Artificial Sequence: Synthetic light chain variable region CDR L2"
gatgtcagtaagcggccctca

SEQ ID NO: 1855 - protein, 9 aa, Artificial Sequence
  source: /note="Description of Artificial Sequence: Synthetic light chain variable region CDR L3"
CSYAGGLYV

SEQ ID NO: 1856 - DNA, 27 bp, Artificial Sequence
  source: /note="Description of Artificial Sequence: Synthetic light chain variable region CDR L3"
tgctcatatgcaggcggcctttatgtc

SEQ ID NO: 1857 - DNA, 378 bp, Artificial Sequence
  source: /note="Description of Artificial Sequence: Synthetic heavy chain variable region"
gaggtgcagctggtggagtccggggctgaggtgaagaagcctggggcctcagtgaaggtctcctgcaaggcttctggatacaccttcaccacttatgatatcaactgggtgcgacaggccactggacgggggcttgagtggatgggatggatgacccctgatagtggtagcacaggctatccacagaacttccagggcagagtcaccatgaccaggaacacctccataagcacagcctacatggagttgagcaacctgagatctgaggacacggccgtatattactgtgtgcaaatggaccattgtagaagtaccagctgctctgaggggaactggttcgacacctggggccagggaaccctggtcaccgtctcctca

SEQ ID NO: 1858 - protein, 126 aa, Artificial Sequence
  source: /note="Description of Artificial Sequence: Synthetic heavy chain variable region"
EVQLVESGAEVKKPGASVKVSCKASGYTFTTYDINWVRQATGRGLEWMGWMTPDSGSTGYPQNFQGRVTMTRNTSISTAYMELSNLRSEDTAVYYCVQMDHCRSTSCSEGNWFDTWGQGTLVTVSS

SEQ ID NO: 1859 - protein, 9 aa, Artificial Sequence
  source: /note="Description of Artificial Sequence: Synthetic heavy chain variable region CDR H1"
YTFTTYDIN

SEQ ID NO: 1860 - DNA, 27 bp, Artificial Sequence
  source: /note="Description of Artificial Sequence: Synthetic heavy chain variable region CDR H1"
tacaccttcaccacttatgatatcaac

SEQ ID NO: 1861 - protein, 17 aa, Artificial Sequence
  source: /note="Description of Artificial Sequence: Synthetic heavy chain variable region CDR H2"
WMTPDSGSTGYPQNFQG

SEQ ID NO: 1862 - DNA, 51 bp, Artificial Sequence
  source: /note="Description of Artificial Sequence: Synthetic heavy chain variable region CDR H2"
tggatgacccctgatagtggtagcacaggctatccacagaacttccagggc

SEQ ID NO: 1863 - protein, 19 aa, Artificial Sequence
  source: /note="Description of Artificial Sequence: Synthetic heavy chain variable region CDR H3"
VQMDHCRSTSCSEGNWFDT

SEQ ID NO: 1864 - DNA, 57 bp, Artificial Sequence
  source: /note="Description of Artificial Sequence: Synthetic heavy chain variable region CDR H3"
gtgcaaatggaccattgtagaagtaccagctgctctgaggggaactggttcgacacc

SEQ ID NO: 1865 - DNA, 330 bp, Artificial Sequence
  source: /note="Description of Artificial Sequence: Synthetic light chain variable region"
cagcctgggctgactcagccaccctcggtgtctgcagcccccaggcagagggtcaccatctcctgttctggaagcagctccaacatcggaactaatgctgtaaactggtaccagcagctcccaggaaaggctcccaaactcctcatctattctgataatctgatgccctcaggggtctctgcccgattctctggctccaagtctggcacctcggcctccctggccatcagtgggctccagtctgaggatgaggctgattattactgtgcagcatgggatgacagcctgaatgtttgggtgttcggcggggggaccaagctcaccgtccta

SEQ ID NO: 1866 - protein, 110 aa, Artificial Sequence
  source: /note="Description of Artificial Sequence: Synthetic light chain variable region"
QPGLTQPPSVSAAPRQRVTISCSGSSSNIGTNAVNWYQQLPGKAPKLLIYSDNLMPSGVSARFSGSKSGTSASLAISGLQSEDEADYYCAAWDDSLNVWVFGGGTKLTVL

SEQ ID NO: 1867 - protein, 13 aa, Artificial Sequence
  source: /note="Description of Artificial Sequence: Synthetic light chain variable region CDR L1"
SGSSSNIGTNAVN

SEQ ID NO: 1868 - DNA, 39 bp, Artificial Sequence
  source: /note="Description of Artificial Sequence: Synthetic light chain variable region CDR L1"
tctggaagcagctccaacatcggaactaatgctgtaaac

SEQ ID NO: 1869 - protein, 7 aa, Artificial Sequence
  source: /note="Description of Artificial Sequence: Synthetic light chain variable region CDR L2"
SDNLMPS

SEQ ID NO: 1870 - DNA, 21 bp, Artificial Sequence
  source: /note="Description of Artificial Sequence: Synthetic light chain variable region CDR L2"
tctgataatctgatgccctca

SEQ ID NO: 1871 - protein, 11 aa, Artificial Sequence
  source: /note="Description of Artificial Sequence: Synthetic light chain variable region CDR L3"
AAWDDSLNVWV

SEQ ID NO: 1872 - DNA, 33 bp, Artificial Sequence
  source: /note="Description of Artificial Sequence: Synthetic light chain variable region CDR L3"
gcagcatgggatgacagcctgaatgtttgggtg

SEQ ID NO: 1873 - DNA, 375 bp, Artificial Sequence
  source: /note="Description of Artificial Sequence: Synthetic heavy chain variable region"
gaggtgcagctggtggagtctgggggaggcttggtgaagccagggcggtccctgagactctcctgtacagcctctggattcaacttcggtgattatgctatgagctggttccgccaggctccagggaaggggctggagtgggtaggtttcattagaagcaaaacttatcgtgagacaagagaatacgccgcgtctgtgaaaggcagattcaccatgtcaagagatgatttcaacaggatcgcctatctgcaaatgaacagcctgaaaaccgaggacacagccatgtattattgtacgagacaagacgatttttggagtggtcatccctactactttgagtactggggccagggaaccctggtcaccgtctcctca

SEQ ID NO: 1874 - protein, 125 aa, Artificial Sequence
  source: /note="Description of Artificial Sequence: Synthetic heavy chain variable region"
EVQLVESGGGLVKPGRSLRLSCTASGFNFGDYAMSWFRQAPGKGLEWVGFIRSKTYRETREYAASVKGRFTMSRDDFNRIAYLQMNSLKTEDTAMYYCTRQDDFWSGHPYYFEYWGQGTLVTVSS

SEQ ID NO: 1875 - protein, 9 aa, Artificial Sequence
  source: /note="Description of Artificial Sequence: Synthetic heavy chain variable region CDR H1"
FNFGDYAMS

SEQ ID NO: 1876 - DNA, 27 bp, Artificial Sequence
  source: /note="Description of Artificial Sequence: Synthetic heavy chain variable region CDR H1"
ttcaacttcggtgattatgctatgagc

SEQ ID NO: 1877 - protein, 19 aa, Artificial Sequence
  source: /note="Description of Artificial Sequence: Synthetic heavy chain variable region CDR H2"
FIRSKTYRETREYAASVKG

SEQ ID NO: 1878 - DNA, 57 bp, Artificial Sequence
  source: /note="Description of Artificial Sequence: Synthetic heavy chain variable region CDR H2"
ttcattagaagcaaaacttatcgtgagacaagagaatacgccgcgtctgtgaaaggc

SEQ ID NO: 1879 - protein, 16 aa, Artificial Sequence
  source: /note="Description of Artificial Sequence: Synthetic heavy chain variable region CDR H3"
TRQDDFWSGHPYYFEY

SEQ ID NO: 1880 - DNA, 48 bp, Artificial Sequence
  source: /note="Description of Artificial Sequence: Synthetic heavy chain variable region CDR H3"
acgagacaagacgatttttggagtggtcatccctactactttgagtac

SEQ ID NO: 1881 - DNA, 333 bp, Artificial Sequence
  source: /note="Description of Artificial Sequence: Synthetic light chain variable region"
cagcctgtgctgactcagcccccctccgcgtccgggtctcctggacagtcagtcaccatctcctgcactggaaccaacagtgacgtgggtagttataactatgtctcctggtaccaacatcacccaggcaaagcccccaaactcatcatttatgacgtcgctaagcggccctcaggggtccctgatcgcttctctggctccaagtctggcaacacggcctccctgaccgtctctgggctccaggctgaggatgaggctgattattactgcagctcatatgcaggcagtaacgatttgggggtcttcggaactgggaccaagctcaccgtccta

SEQ ID NO: 1882 - protein, 111 aa, Artificial Sequence
  source: /note="Description of Artificial Sequence: Synthetic light chain variable region"
QPVLTQPPSASGSPGQSVTISCTGTNSDVGSYNYVSWYQHHPGKAPKLIIYDVAKRPSGVPDRFSGSKSGNTASLTVSGLQAEDEADYYCSSYAGSNDLGVFGTGTKLTVL

SEQ ID NO: 1883 - protein, 14 aa, Artificial Sequence
  source: /note="Description of Artificial Sequence: Synthetic light chain variable region CDR L1"
TGTNSDVGSYNYVS

SEQ ID NO: 1884 - DNA, 42 bp, Artificial Sequence
  source: /note="Description of Artificial Sequence: Synthetic light chain variable region CDR L1"
actggaaccaacagtgacgtgggtagttataactatgtctcc

SEQ ID NO: 1885 - protein, 7 aa, Artificial Sequence
  source: /note="Description of Artificial Sequence: Synthetic light chain variable region CDR L2"
DVAKRPS

SEQ ID NO: 1886 - DNA, 21 bp, Artificial Sequence
  source: /note="Description of Artificial Sequence: Synthetic light chain variable region CDR L2"
gacgtcgctaagcggccctca

SEQ ID NO: 1887 - protein, 11 aa, Artificial Sequence
  source: /note="Description of Artificial Sequence: Synthetic light chain variable region CDR L3"
SSYAGSNDLGV

SEQ ID NO: 1888 - DNA, 33 bp, Artificial Sequence
  source: /note="Description of Artificial Sequence: Synthetic light chain variable region CDR L3"
agctcatatgcaggcagtaacgatttgggggtc

SEQ ID NO: 1889 - DNA, 372 bp, Artificial Sequence
  source: /note="Description of Artificial Sequence: Synthetic heavy chain variable region"
gaggtgcagctggtggagtccggcccaggactggtgaagccttcggagaccctgtccctcacctgcactgtgtctggtggctccgtcagtggtcactactggagctggattcggcagttcccagggaaggaactggaatggattggtcatatctattatattgggacgaccaactacaacccctccctcaagagtcgagtcatcatatcgctagacacgtccaagaatcagctctccctgaagctgagttctgtgaccgctgcggacactgccgtttattattgtgccagacagttcggctatgataaaaatactttaagtcggcttgactttgactactggggccagggaaccctggtcaccgtctcctca

SEQ ID NO: 1890 - protein, 124 aa, Artificial Sequence
  source: /note="Description of Artificial Sequence: Synthetic heavy chain variable region"
EVQLVESGPGLVKPSETLSLTCTVSGGSVSGHYWSWIRQFPGKELEWIGHIYYIGTTNYNPSLKSRVIISLDTSKNQLSLKLSSVTAADTAVYYCARQFGYDKNTLSRLDFDYWGQGTLVTVSS

SEQ ID NO: 1891 - protein, 9 aa, Artificial Sequence
  source: /note="Description of Artificial Sequence: Synthetic heavy chain variable region CDR H1"
GSVSGHYWS

SEQ ID NO: 1892 - DNA, 27 bp, Artificial Sequence
  source: /note="Description of Artificial Sequence: Synthetic heavy chain variable region CDR H1"
ggctccgtcagtggtcactactggagc

SEQ ID NO: 1893 - protein, 16 aa, Artificial Sequence
  source: /note="Description of Artificial Sequence: Synthetic heavy chain variable region CDR H2"
HIYYIGTTNYNPSLKS

SEQ ID NO: 1894 - DNA, 48 bp, Artificial Sequence
  source: /note="Description of Artificial Sequence: Synthetic heavy chain variable region CDR H2"
catatctattatattgggacgaccaactacaacccctccctcaagagt

SEQ ID NO: 1895 - protein, 18 aa, Artificial Sequence
  source: /note="Description of Artificial Sequence: Synthetic heavy chain variable region CDR H3"
ARQFGYDKNTLSRLDFDY

SEQ ID NO: 1896 - DNA, 54 bp, Artificial Sequence
  source: /note="Description of Artificial Sequence: Synthetic heavy chain variable region CDR H3"
gccagacagttcggctatgataaaaatactttaagtcggcttgactttgactac

SEQ ID NO: 1897 - DNA, 321 bp, Artificial Sequence
  source: /note="Description of Artificial Sequence: Synthetic light chain variable region"
gacatccagatgacccagtctccatcctccctgtctgcatctgtaagagacagagtcaccatcacttgccgggcaagtcagagcattagcagctatttaaattggtatcaacagagaccagggaaagcccctaagctcctgatctattctgcattcagtttacatagtggtgtcccatcaaggttcagtggcagtggatctgagacagagttcactctcaccatcagcagtctgcaacctgacgattttgcaacttattactgtcaacagagttacagtattccctggacgttcggccaagggaccaaggtggaaatcaaa

SEQ ID NO: 1898 - protein, 107 aa, Artificial Sequence
  source: /note="Description of Artificial Sequence: Synthetic light chain variable region"
DIQMTQSPSSLSASVRDRVTITCRASQSISSYLNWYQQRPGKAPKLLIYSAFSLHSGVPSRFSGSGSETEFTLTISSLQPDDFATYYCQQSYSIPWTFGQGTKVEIK

SEQ ID NO: 1899 - protein, 11 aa, Artificial Sequence
  source: /note="Description of Artificial Sequence: Synthetic light chain variable region CDR L1"
RASQSISSYLN

SEQ ID NO: 1900 - DNA, 33 bp, Artificial Sequence
  source: /note="Description of Artificial Sequence: Synthetic light chain variable region CDR L1"
cgggcaagtcagagcattagcagctatttaaat

SEQ ID NO: 1901 - protein, 7 aa, Artificial Sequence
  source: /note="Description of Artificial Sequence: Synthetic light chain variable region CDR L2"
SAFSLHS

SEQ ID NO: 1902 - DNA, 21 bp, Artificial Sequence
  source: /note="Description of Artificial Sequence: Synthetic light chain variable region CDR L2"
tctgcattcagtttacatagt

SEQ ID NO: 1903 - protein, 9 aa, Artificial Sequence
  source: /note="Description of Artificial Sequence: Synthetic light chain variable region CDR L3"
QQSYSIPWT

SEQ ID NO: 1904 - DNA, 27 bp, Artificial Sequence
  source: /note="Description of Artificial Sequence: Synthetic light chain variable region CDR L3"
caacagagttacagtattccctggacg

SEQ ID NO: 1905 - DNA, 369 bp, Artificial Sequence
  source: /note="Description of Artificial Sequence: Synthetic heavy chain variable region"
caggtgcagctgcaggagtccggcccgggactggtgaagccttcggagaccctgtccctcacctgcagtgtctctggtggctccatcaccaatgttaattactactggggctggatccgccagccccccgggaagggcctggagtggattgggagtatctattataatggaaacacctactacaacccgtccctccagagtcgagtcaccatgtccgtggacacgtccaagaaccacttctccctgaggctgacgtctgtgaccgccgcagacacggctgtatatttttgtgcgagagaggggcctaattgggaattgttgaatgctttcgatatctggggccaagggaccacggtcaccgtctcctca

SEQ ID NO: 1906 - protein, 123 aa, Artificial Sequence; identical to SEQ ID NO: 1266
  source: /note="Description of Artificial Sequence: Synthetic heavy chain variable region"

SEQ ID NO: 1907 - protein, 11 aa, Artificial Sequence
  source: /note="Description of Artificial Sequence: Synthetic heavy chain variable region CDR H1"
GSITNVNYYWG

SEQ ID NO: 1908 - DNA, 33 bp, Artificial Sequence; identical to SEQ ID NO: 1268
  source: /note="Description of Artificial Sequence: Synthetic heavy chain variable region CDR H1"

SEQ ID NO: 1909 - protein, 16 aa, Artificial Sequence
  source: /note="Description of Artificial Sequence: Synthetic heavy chain variable region CDR H2"
SIYYNGNTYYNPSLQS

SEQ ID NO: 1910 - DNA, 48 bp, Artificial Sequence; identical to SEQ ID NO: 1270
  source: /note="Description of Artificial Sequence: Synthetic heavy chain variable region CDR H2"

SEQ ID NO: 1911 - protein, 15 aa, Artificial Sequence
  source: /note="Description of Artificial Sequence: Synthetic heavy chain variable region CDR H3"
AREGPNWELLNAFDI

SEQ ID NO: 1912 - DNA, 45 bp, Artificial Sequence; identical to SEQ ID NO: 1272
  source: /note="Description of Artificial Sequence: Synthetic heavy chain variable region CDR H3"

SEQ ID NO: 1913 - DNA, 324 bp, Artificial Sequence
  source: /note="Description of Artificial Sequence: Synthetic light chain variable region"
tcctatgagctgactcagccaccctcggtgtcagtggccccaggacagacggccaggattacctgtgggggaaacaacattggaagtaaaaatgtgcactggtaccagcagaagccaggccaggcccctgtcttggtcgtctatgaggatacccaccggccctcagggatccctgagcgattctctggctccaactctgggaacacggccaccctgaccatcagtagggtcgaagccggggatgaggccgactattactgtcaggtgtgggatactagtagtgatcatgtggtattcggcggagggaccaagctgaccgtcctc

SEQ ID NO: 1914 - protein, 108 aa, Artificial Sequence
  source: /note="Description of Artificial Sequence: Synthetic light chain variable region"
SYELTQPPSVSVAPGQTARITCGGNNIGSKNVHWYQQKPGQAPVLVVYEDTHRPSGIPERFSGSNSGNTATLTISRVEAGDEADYYCQVWDTSSDHVVFGGGTKLTVL

SEQ ID NO: 1915 - protein, 11 aa, Artificial Sequence
  source: /note="Description of Artificial Sequence: Synthetic light chain variable region CDR L1"
GGNNIGSKNVH

SEQ ID NO: 1916 - DNA, 33 bp, Artificial Sequence; identical to SEQ ID NO: 1276
  source: /note="Description of Artificial Sequence: Synthetic light chain variable region CDR L1"

SEQ ID NO: 1917 - protein, 7 aa, Artificial Sequence
  source: /note="Description of Artificial Sequence: Synthetic light chain variable region CDR L2"
EDTHRPS

SEQ ID NO: 1918 - DNA, 21 bp, Artificial Sequence
  source: /note="Description of Artificial Sequence: Synthetic light chain variable region CDR L2"
gaggatacccaccggccctca

SEQ ID NO: 1919 - protein, 11 aa, Artificial Sequence
  source: /note="Description of Artificial Sequence: Synthetic light chain variable region CDR L3"
QVWDTSSDHVV

SEQ ID NO: 1920 - DNA, 33 bp, Artificial Sequence; identical to SEQ ID NO: 1280
  source: /note="Description of Artificial Sequence: Synthetic light chain variable region CDR L3"

SEQ ID NO: 1921 - DNA, 363 bp, Artificial Sequence
  source: /note="Description of Artificial Sequence: Synthetic heavy chain variable region"
caggtccagcttgtgcagtctggggctgaggtgaagaagcctggggcctcagtgaaggtctcctgcaagacttctggttacacctttagtcatttcggtgtcacctggatacgacaggccccaggacaagggcttgagtggctgggatggatcagcgcttacaatggtaacacagactctgcagacaaactgcagggcagactcaccatgacgacagacacatccacgaacaccgcctacatggagttgaggagcctcagatctgacgacacggccgtctattactgtgcgagagatccccccgcatcagctgctgccatgcttgactactggggccagggaaccctggtcaccgtctcctca

SEQ ID NO: 1922 - protein, 121 aa, Artificial Sequence
  source: /note="Description of Artificial Sequence: Synthetic heavy chain variable region"
QVQLVQSGAEVKKPGASVKVSCKTSGYTFSHFGVTWIRQAPGQGLEWLGWISAYNGNTDSADKLQGRLTMTTDTSTNTAYMELRSLRSDDTAVYYCARDPPASAAAMLDYWGQGTLVTVSS

SEQ ID NO: 1923 - protein, 9 aa, Artificial Sequence
  source: /note="Description of Artificial Sequence: Synthetic heavy chain variable region CDR H1"
YTFSHFGVT

SEQ ID NO: 1924 - DNA, 27 bp, Artificial Sequence
  source: /note="Description of Artificial Sequence: Synthetic heavy chain variable region CDR H1"
tacacctttagtcatttcggtgtcacc

SEQ ID NO: 1925 - protein, 17 aa, Artificial Sequence
  source: /note="Description of Artificial Sequence: Synthetic heavy chain variable region CDR H2"
WISAYNGNTDSADKLQG

SEQ ID NO: 1926 - DNA, 51 bp, Artificial Sequence
  source: /note="Description of Artificial Sequence: Synthetic heavy chain variable region CDR H2"
tggatcagcgcttacaatggtaacacagactctgcagacaaactgcagggc

SEQ ID NO: 1927 - protein, 14 aa, Artificial Sequence
  source: /note="Description of Artificial Sequence: Synthetic heavy chain variable region CDR H3"
ARDPPASAAAMLDY

SEQ ID NO: 1928 - DNA, 42 bp, Artificial Sequence
  source: /note="Description of Artificial Sequence: Synthetic heavy chain variable region CDR H3"
gcgagagatccccccgcatcagctgctgccatgcttgactac

SEQ ID NO: 1929 - DNA, 339 bp, Artificial Sequence
  source: /note="Description of Artificial Sequence: Synthetic light chain variable region"
gacatccagatgacccagtctccactctccctggccgtcacccttggacagccggcctccatctcctgcaggtctagtcaaggcctcgaatacactgatggaaacacctacttgagttggtttcagcagaggccaggccaatctccaaggcgcctcatttataaggtttctaatcgggactctggggtcccagacagattcagcggcagcggggcaggcactgatttcacactgagaatcagcagggtggaggctgaggatgttggggtttattactgcatgcaaggtacacacgggcggggaatctctttcggtcctgggaccaaagtggatatcaaa

SEQ ID NO: 1930 - protein, 113 aa, Artificial Sequence
  source: /note="Description of Artificial Sequence: Synthetic light chain variable region"
DIQMTQSPLSLAVTLGQPASISCRSSQGLEYTDGNTYLSWFQQRPGQSPRRLIYKVSNRDSGVPDRFSGSGAGTDFTLRISRVEAEDVGVYYCMQGTHGRGISFGPGTKVDIK

SEQ ID NO: 1931 - protein, 16 aa, Artificial Sequence
  source: /note="Description of Artificial Sequence: Synthetic light chain variable region CDR L1"
RSSQGLEYTDGNTYLS

SEQ ID NO: 1932 - DNA, 48 bp, Artificial Sequence
  source: /note="Description of Artificial Sequence: Synthetic light chain variable region CDR L1"
aggtctagtcaaggcctcgaatacactgatggaaacacctacttgagt

SEQ ID NO: 1933 - protein, 7 aa, Artificial Sequence
  source: /note="Description of Artificial Sequence: Synthetic light chain variable region CDR L2"
KVSNRDS

SEQ ID NO: 1934 - DNA, 21 bp, Artificial Sequence
  source: /note="Description of Artificial Sequence: Synthetic light chain variable region CDR L2"
aaggtttctaatcgggactct

SEQ ID NO: 1935 - protein, 10 aa, Artificial Sequence
  source: /note="Description of Artificial Sequence: Synthetic light chain variable region CDR L3"
MQGTHGRGIS

SEQ ID NO: 1936 - DNA, 30 bp, Artificial Sequence; identical to SEQ ID NO: 784
  source: /note="Description of Artificial Sequence: Synthetic light chain variable region CDR L3"

SEQ ID NO: 1937 - DNA, 363 bp, Artificial Sequence
  source: /note="Description of Artificial Sequence: Synthetic heavy chain variable region"
caggtgcagctggtgcagtctggggctgaggtgaagaagcctggggcctcagtgagggtctcctgcaaggcctctggatacaccttcaccgactactttatgaactgggtgcgacaggcccctggagggggccttgagtggatggggtggatcaatcctctcagtggagtcacaaaatatgcacagcagtttcagggcagtgtcaccatgaccactgacacgtccatcaccacaggctacatggagctgaggagcctgagagttgacgacacggccgtctattattgtgcgagccagtcttccccttacaccccgggcgccatgggcgtctggggccaagggaccacggtcaccgtctcctca

SEQ ID NO: 1938 - protein, 121 aa, Artificial Sequence
  source: /note="Description of Artificial Sequence: Synthetic heavy chain variable region"
QVQLVQSGAEVKKPGASVRVSCKASGYTFTDYFMNWVRQAPGGGLEWMGWINPLSGVTKYAQQFQGSVTMTTDTSITTGYMELRSLRVDDTAVYYCASQSSPYTPGAMGVWGQGTTVTVSS

SEQ ID NO: 1939 - protein, 9 aa, Artificial Sequence
  source: /note="Description of Artificial Sequence: Synthetic heavy chain variable region CDR H1"
YTFTDYFMN

SEQ ID NO: 1940 - DNA, 27 bp, Artificial Sequence
  source: /note="Description of Artificial Sequence: Synthetic heavy chain variable region CDR H1"
tacaccttcaccgactactttatgaac

SEQ ID NO: 1941 - protein, 17 aa, Artificial Sequence
  source: /note="Description of Artificial Sequence: Synthetic heavy chain variable region CDR H2"
WINPLSGVTKYAQQFQG

SEQ ID NO: 1942 - DNA, 51 bp, Artificial Sequence
  source: /note="Description of Artificial Sequence: Synthetic heavy chain variable region CDR H2"
tggatcaatcctctcagtggagtcacaaaatatgcacagcagtttcagggc

SEQ ID NO: 1943 - protein, 14 aa, Artificial Sequence
  source: /note="Description of Artificial Sequence: Synthetic heavy chain variable region CDR H3"
ASQSSPYTPGAMGV

SEQ ID NO: 1944 - DNA, 42 bp, Artificial Sequence
  source: /note="Description of Artificial Sequence: Synthetic heavy chain variable region CDR H3"
gcgagccagtcttccccttacaccccgggcgccatgggcgtc

SEQ ID NO: 1945 - DNA, 321 bp, Artificial Sequence
  source: /note="Description of Artificial Sequence: Synthetic light chain variable region"
gacatccggatgacccagtctccatcctccctgtctgcatctgtaggagacagagtcaccatcacttgccggacaagtcagagcgttagcggctatttaagttggtatcagcagaaaccagggaaagcccctaagctcctgatctatgcggcatccaatttgtacagtggggtcccatcaaggttcagtggcagtggatctgggacagatttcactctcaccatcaccagtctgcaacctgaagattttgcaacttacttctgtcaactgaattccggtgccctattcactttcggccctgggaccaaggtggaaatcaaa

SEQ ID NO: 1946 - protein, 107 aa, Artificial Sequence
  source: /note="Description of Artificial Sequence: Synthetic light chain variable region"
DIRMTQSPSSLSASVGDRVTITCRTSQSVSGYLSWYQQKPGKAPKLLIYAASNLYSGVPSRFSGSGSGTDFTLTITSLQPEDFATYFCQLNSGALFTFGPGTKVEIK

SEQ ID NO: 1947 - protein, 11 aa, Artificial Sequence
  source: /note="Description of Artificial Sequence: Synthetic light chain variable region CDR L1"
RTSQSVSGYLS

SEQ ID NO: 1948 - DNA, 33 bp, Artificial Sequence
  source: /note="Description of Artificial Sequence: Synthetic light chain variable region CDR L1"
cggacaagtcagagcgttagcggctatttaagt

SEQ ID NO: 1949 - protein, 7 aa, Artificial Sequence
  source: /note="Description of Artificial Sequence: Synthetic light chain variable region CDR L2"
AASNLYS

SEQ ID NO: 1950 - DNA, 21 bp, Artificial Sequence
  source: /note="Description of Artificial Sequence: Synthetic light chain variable region CDR L2"
gcggcatccaatttgtacagt

SEQ ID NO: 1951 - protein, 9 aa, Artificial Sequence
  source: /note="Description of Artificial Sequence: Synthetic light chain variable region CDR L3"
QLNSGALFT

SEQ ID NO: 1952 - DNA, 27 bp, Artificial Sequence
  source: /note="Description of Artificial Sequence: Synthetic light chain variable region CDR L3"
caactgaattccggtgccctattcact

SEQ ID NO: 1953 - DNA, 363 bp, Artificial Sequence
  source: /note="Description of Artificial Sequence: Synthetic heavy chain variable region"
gaggtgcagctggtggagtctgggggaggcttggtcaagcctggagagtccgtgaaactctcctgcgcagcgtctggattcaccatcactgactcctacatggcctggatccgccagtctccagggaaggggctggagtggcttgcttacattagtagtactagtcttttcacagactacacagactctgtgaagggccgattcatcatcaccagagacaatgccgagaactcactctatctgcaaatgaccagcctgacaccggcagacacgggtgtctatttctgtgcgagggccaaaacatcctactacttctacgctctggacgtctggggcccaggcaccctggtcaccgtctcctca

SEQ ID NO: 1954 - protein, 121 aa, Artificial Sequence
  source: /note="Description of Artificial Sequence: Synthetic heavy chain variable region"
EVQLVESGGGLVKPGESVKLSCAASGFTITDSYMAWIRQSPGKGLEWLAYISSTSLFTDYTDSVKGRFIITRDNAENSLYLQMTSLTPADTGVYFCARAKTSYYFYALDVWGPGTLVTVSS

SEQ ID NO: 1955 - protein, 9 aa, Artificial Sequence
  source: /note="Description of Artificial Sequence: Synthetic heavy chain variable region CDR H1"
FTITDSYMA

SEQ ID NO: 1956 - DNA, 27 bp, Artificial Sequence
  source: /note="Description of Artificial Sequence: Synthetic heavy chain variable region CDR H1"
ttcaccatcactgactcctacatggcc

SEQ ID NO: 1957 - protein, 17 aa, Artificial Sequence
  source: /note="Description of Artificial Sequence: Synthetic heavy chain variable region CDR H2"
YISSTSLFTDYTDSVKG

SEQ ID NO: 1958 - DNA, 51 bp, Artificial Sequence
  source: /note="Description of Artificial Sequence: Synthetic heavy chain variable region CDR H2"
tacattagtagtactagtcttttcacagactacacagactctgtgaagggc

SEQ ID NO: 1959 - protein, 14 aa, Artificial Sequence
  source: /note="Description of Artificial Sequence: Synthetic heavy chain variable region CDR H3"
ARAKTSYYFYALDV

SEQ ID NO: 1960 - DNA, 42 bp, Artificial Sequence
  source: /note="Description of Artificial Sequence: Synthetic heavy chain variable region CDR H3"
gcgagggccaaaacatcctactacttctacgctctggacgtc

SEQ ID NO: 1961 - DNA, 321 bp, Artificial Sequence
  source: /note="Description of Artificial Sequence: Synthetic light chain variable region"
gaaacgacactcacgcagtctccaggcacgctgtctttgtctccgggggaaagagccaccctctcctgcagggccagtcagagtgttaacaacaactatctagcctggttccagcacaaacctggccaggctcccagactcctcatctataatgcatccaacagggccgctggcatcccagacaggttcagtggtagtgggtctgggacagacttcactctcaccatcagcaaactggagcctggagattctgcagtgtattactgtcagcgatatgggaactcttggccgttcggccaagggaccaaggtggaaatcaaa

SEQ ID NO: 1962 - protein, 107 aa, Artificial Sequence
  source: /note="Description of Artificial Sequence: Synthetic light chain variable region"
ETTLTQSPGTLSLSPGERATLSCRASQSVNNNYLAWFQHKPGQAPRLLIYNASNRAAGIPDRFSGSGSGTDFTLTISKLEPGDSAVYYCQRYGNSWPFGQGTKVEIK

SEQ ID NO: 1963 - protein, 12 aa, Artificial Sequence
  source: /note="Description of Artificial Sequence: Synthetic light chain variable region CDR L1"
RASQSVNNNYLA

SEQ ID NO: 1964 - DNA, 36 bp, Artificial Sequence
  source: /note="Description of Artificial Sequence: Synthetic light chain variable region CDR L1"
agggccagtcagagtgttaacaacaactatctagcc

SEQ ID NO: 1965 - protein, 7 aa, Artificial Sequence
  source: /note="Description of Artificial Sequence: Synthetic light chain variable region CDR L2"
NASNRAA

SEQ ID NO: 1966 - DNA, 21 bp, Artificial Sequence
  source: /note="Description of Artificial Sequence: Synthetic light chain variable region CDR L2"
aatgcatccaacagggccgct

SEQ ID NO: 1967 - protein, 8 aa, Artificial Sequence
  source: /note="Description of Artificial Sequence: Synthetic light chain variable region CDR L3"
QRYGNSWP

SEQ ID NO: 1968 - DNA, 24 bp, Artificial Sequence
  source: /note="Description of Artificial Sequence: Synthetic light chain variable region CDR L3"
cagcgatatgggaactcttggccg

SEQ ID NO: 1969 - DNA, 372 bp, Artificial Sequence
  source: /note="Description of Artificial Sequence: Synthetic heavy chain variable region"
caggtccagctggtgcagtctgggggaggcttggtacagcctggggggtccctgagactctcctgtgcagcctctggattcacctttagtcagtctcccatgagctgggtccgccaggctcctgggaaggggctggagtgggtctccggtattagtactggagggaccaatacatactacgcagactccgtgaagggccgcttcaccatctccagagacaattccaagaacacgttgtatctgcaaatgaccagcctgagagtcggggacacggccgtgtattactgtgcgaaagagagtttagactttggttcagggagctacaactggttcgacacctggggccagggaaccctggtcactgtctcctca

SEQ ID NO: 1970 - protein, 124 aa, Artificial Sequence
  source: /note="Description of Artificial Sequence: Synthetic heavy chain variable region"
QVQLVQSGGGLVQPGGSLRLSCAASGFTFSQSPMSWVRQAPGKGLEWVSGISTGGTNTYYADSVKGRFTISRDNSKNTLYLQMTSLRVGDTAVYYCAKESLDFGSGSYNWFDTWGQGTLVTVSS

SEQ ID NO: 1971 - protein, 9 aa, Artificial Sequence
  source: /note="Description of Artificial Sequence: Synthetic heavy chain variable region CDR H1"
FTFSQSPMS

SEQ ID NO: 1972 - DNA, 27 bp, Artificial Sequence
  source: /note="Description of Artificial Sequence: Synthetic heavy chain variable region CDR H1"
ttcacctttagtcagtctcccatgagc

SEQ ID NO: 1973 - protein, 17 aa, Artificial Sequence
  source: /note="Description of Artificial Sequence: Synthetic heavy chain variable region CDR H2"
GISTGGTNTYYADSVKG

SEQ ID NO: 1974 - DNA, 51 bp, Artificial Sequence
  source: /note="Description of Artificial Sequence: Synthetic heavy chain variable region CDR H2"
ggtattagtactggagggaccaatacatactacgcagactccgtgaagggc

SEQ ID NO: 1975 - protein, 17 aa, Artificial Sequence
  source: /note="Description of Artificial Sequence: Synthetic heavy chain variable region CDR H3"
AKESLDFGSGSYNWFDT

SEQ ID NO: 1976 - DNA, 51 bp, Artificial Sequence
  source: /note="Description of Artificial Sequence: Synthetic heavy chain variable region CDR H3"
gcgaaagagagtttagactttggttcagggagctacaactggttcgacacc

SEQ ID NO: 1977 - DNA, 336 bp, Artificial Sequence
  source: /note="Description of Artificial Sequence: Synthetic light chain variable region"
gaaattgtattgacgcagtctccagactccctggctgtgtctctgggcgagagggccaccatcaactgcaagtccagccagagtgttttatacaggtccaacaataagaactacttagcttggtaccagcagagaccaggacagcctcctaggctgctcatttcctgggcatctacccgggaatccggggtccctgaccgattcactggcagcgggtctgggacagatttcactctcaccatcagcagcctgcaggctgaagatgtggcagtttattactgtcaccaatattatgatacccacacttttggccaggggaccaaagtggatatcaaa

SEQ ID NO: 1978 - protein, 112 aa, Artificial Sequence
  source: /note="Description of Artificial Sequence: Synthetic light chain variable region"
EIVLTQSPDSLAVSLGERATINCKSSQSVLYRSNNKNYLAWYQQRPGQPPRLLISWASTRESGVPDRFTGSGSGTDFTLTISSLQAEDVAVYYCHQYYDTHTFGQGTKVDIK

SEQ ID NO: 1979 - protein, 17 aa, Artificial Sequence
  source: /note="Description of Artificial Sequence: Synthetic light chain variable region CDR L1"
KSSQSVLYRSNNKNYLA

SEQ ID NO: 1980 - DNA, 51 bp, Artificial Sequence
  source: /note="Description of Artificial Sequence: Synthetic light chain variable region CDR L1"
aagtccagccagagtgttttatacaggtccaacaataagaactacttagct

SEQ ID NO: 1981 - protein, 7 aa, Artificial Sequence
  source: /note="Description of Artificial Sequence: Synthetic light chain variable region CDR L2"
WASTRES

SEQ ID NO: 1982 - DNA, 21 bp, Artificial Sequence
  source: /note="Description of Artificial Sequence: Synthetic light chain variable region CDR L2"
tgggcatctacccgggaatcc

SEQ ID NO: 1983 - protein, 8 aa, Artificial Sequence
  source: /note="Description of Artificial Sequence: Synthetic light chain variable region CDR L3"
HQYYDTHT

SEQ ID NO: 1984 - DNA, 24 bp, Artificial Sequence
  source: /note="Description of Artificial Sequence: Synthetic light chain variable region CDR L3"
caccaatattatgatacccacact

SEQ ID NO: 1985 - DNA, 366 bp, Artificial Sequence
  source: /note="Description of Artificial Sequence: Synthetic heavy chain variable region"
gaggtgcagctggtggagtctgggggaggcgtggtccagcctgggaggtccctgagactctcctgtgtagcctctggattcagcttcagtgcctatggcatgcactgggttcgccaggttccaaccaaggggctggagtgggtggctgttatatcatatgatggaagagatatatactatacagactccgtgaagggccgattcaccatttccagagacaattccaagaacatgttgtatctgcaaatgaacagcctgagacctgaggacagggctgtctattactgtgcgagagatccgtccctcggttataataatcactactttgactattggggccagggaaccctggtcaccgtctcttca

SEQ ID NO: 1986 - protein, 122 aa, Artificial Sequence
  source: /note="Description of Artificial Sequence: Synthetic heavy chain variable region"
EVQLVESGGGVVQPGRSLRLSCVASGFSFSAYGMHWVRQVPTKGLEWVAVISYDGRDIYYTDSVKGRFTISRDNSKNMLYLQMNSLRPEDRAVYYCARDPSLGYNNHYFDYWGQGTLVTVSS

SEQ ID NO: 1987 - protein, 9 aa, Artificial Sequence
  source: /note="Description of Artificial Sequence: Synthetic heavy chain variable region CDR H1"
FSFSAYGMH

SEQ ID NO: 1988 - DNA, 27 bp, Artificial Sequence
  source: /note="Description of Artificial Sequence: Synthetic heavy chain variable region CDR H1"
ttcagcttcagtgcctatggcatgcac

SEQ ID NO: 1989 - protein, 17 aa, Artificial Sequence
  source: /note="Description of Artificial Sequence: Synthetic heavy chain variable region CDR H2"
VISYDGRDIYYTDSVKG

SEQ ID NO: 1990 - DNA, 51 bp, Artificial Sequence
  source: /note="Description of Artificial Sequence: Synthetic heavy chain variable region CDR H2"
gttatatcatatgatggaagagatatatactatacagactccgtgaagggc

SEQ ID NO: 1991 - protein, 15 aa, Artificial Sequence
  source: /note="Description of Artificial Sequence: Synthetic heavy chain variable region CDR H3"
ARDPSLGYNNHYFDY

SEQ ID NO: 1992 - DNA, 45 bp, Artificial Sequence
  source: /note="Description of Artificial Sequence: Synthetic heavy chain variable region CDR H3"
gcgagagatccgtccctcggttataataatcactactttgactat

SEQ ID NO: 1993 - DNA, 327 bp, Artificial Sequence
  source: /note="Description of Artificial Sequence: Synthetic light chain variable region"
gaaattgtgttgacgcagtctccagccaccctgtctttgtctccaggggaaacagccaccctctcctgcagggccagtcagagtgttaccggcaacttagcctggtaccaacagaaacctggccaggctcccaggctcctcatctatgctgcatccaacagggccactggcatcccagccaggttcagtggcagtgggtctgggacagacttcactctcaccatcagcagcctagagcctgaagattttgcagtttatttctgtcagcagcgtagcaactggcctcctatgtacagttttggccaggggaccaagctggagatcaaa

SEQ ID NO: 1994 - protein, 109 aa, Artificial Sequence
  source: /note="Description of Artificial Sequence: Synthetic light chain variable region"
EIVLTQSPATLSLSPGETATLSCRASQSVTGNLAWYQQKPGQAPRLLIYAASNRATGIPARFSGSGSGTDFTLTISSLEPEDFAVYFCQQRSNWPPMYSFGQGTKLEIK

SEQ ID NO: 1995 - protein, 11 aa, Artificial Sequence
  source: /note="Description of Artificial Sequence: Synthetic light chain variable region CDR L1"
RASQSVTGNLA

SEQ ID NO: 1996 - DNA, 33 bp, Artificial Sequence
  source: /note="Description of Artificial Sequence: Synthetic light chain variable region CDR L1"
agggccagtcagagtgttaccggcaacttagcc

SEQ ID NO: 1997 - protein, 7 aa, Artificial Sequence
  source: /note="Description of Artificial Sequence: Synthetic light chain variable region CDR L2"
AASNRAT

SEQ ID NO: 1998 - DNA, 21 bp, Artificial Sequence
  source: /note="Description of Artificial Sequence: Synthetic light chain variable region CDR L2"
gctgcatccaacagggccact

SEQ ID NO: 1999 - protein, 11 aa, Artificial Sequence
  source: /note="Description of Artificial Sequence: Synthetic light chain variable region CDR L3"
QQRSNWPPMYS

SEQ ID NO: 2000 - DNA, 33 bp, Artificial Sequence
  source: /note="Description of Artificial Sequence: Synthetic light chain variable region CDR L3"
cagcagcgtagcaactggcctcctatgtacagt

SEQ ID NO: 2001 - DNA, 375 bp, Artificial Sequence
  source: /note="Description of Artificial Sequence: Synthetic heavy chain variable region"
caggtccagcttgtacagtctggggctgaggtgaagaggcctgggtcctcggtgaaggtctcctgcaaggcctctggaggcaccttcagaggctaccatatcagctgggtgcgacaggcccctggacaagggctcgagtggatgggagggatcatccatctatttgggacagtaagctacgctccgaagttccagggcagagtcacgatcaccgcggacgcatccacgggcacagcccatatggagttgagcagcctgacatctgacgacacggccatatactattgtgcgagagatgcttacgaagtctggacgggttcttatctccccccttttgactactggggccagggaaccctggtcaccgtctcctca

SEQ ID NO: 2002 - protein, 125 aa, Artificial Sequence
  source: /note="Description of Artificial Sequence: Synthetic heavy chain variable region"
QVQLVQSGAEVKRPGSSVKVSCKASGGTFRGYHISWVRQAPGQGLEWMGGIIHLFGTVSYAPKFQGRVTITADASTGTAHMELSSLTSDDTAIYYCARDAYEVWTGSYLPPFDYWGQGTLVTVSS

SEQ ID NO: 2003 - protein, 9 aa, Artificial Sequence
  source: /note="Description of Artificial Sequence: Synthetic heavy chain variable region CDR H1"
GTFRGYHIS

SEQ ID NO: 2004 - DNA, 27 bp, Artificial Sequence
  source: /note="Description of Artificial Sequence: Synthetic heavy chain variable region CDR H1"
ggcaccttcagaggctaccatatcagc

SEQ ID NO: 2005 - protein, 17 aa, Artificial Sequence
  source: /note="Description of Artificial Sequence: Synthetic heavy chain variable region CDR H2"
GIIHLFGTVSYAPKFQG

SEQ ID NO: 2006 - DNA, 51 bp, Artificial Sequence
  source: /note="Description of Artificial Sequence: Synthetic heavy chain variable region CDR H2"
gggatcatccatctatttgggacagtaagctacgctccgaagttccagggc

SEQ ID NO: 2007 - protein, 18 aa, Artificial Sequence
  source: /note="Description of Artificial Sequence: Synthetic heavy chain variable region CDR H3"
ARDAYEVWTGSYLPPFDY

SEQ ID NO: 2008 - DNA, 54 bp, Artificial Sequence
  source: /note="Description of Artificial Sequence: Synthetic heavy chain variable region CDR H3"
gcgagagatgcttacgaagtctggacgggttcttatctccccccttttgactac

SEQ ID NO: 2009 - DNA, 324 bp, Artificial Sequence
  source: /note="Description of Artificial Sequence: Synthetic light chain variable region"
gatattgtgatgactcagactccaggcaccctgtctttgtctcccggggaaagagtcaccctctcctgcagggccagtcagactgttacaagcagctacttagcctggtaccagcagaaacctggccaggctcccagactcctcatctatggtgcattcaccagggccactggcatcccagacaggttcagtggtagtgggtctgggacagacttcactctcaccatcagcagactggagcctgaagattttgcagtatattactgtcagcagtatggtagctcattcctcactttcggcggagggaccaagctggagatcaaa

SEQ ID NO: 2010 - protein, 108 aa, Artificial Sequence
  source: /note="Description of Artificial Sequence: Synthetic light chain variable region"
DIVMTQTPGTLSLSPGERVTLSCRASQTVTSSYLAWYQQKPGQAPRLLIYGAFTRATGIPDRFSGSGSGTDFTLTISRLEPEDFAVYYCQQYGSSFLTFGGGTKLEIK

SEQ ID NO: 2011 - protein, 12 aa, Artificial Sequence
  source: /note="Description of Artificial Sequence: Synthetic light chain variable region CDR L1"
RASQTVTSSYLA

SEQ ID NO: 2012 - DNA, 36 bp, Artificial Sequence; identical to SEQ ID NO: 844
  source: /note="Description of Artificial Sequence: Synthetic light chain variable region CDR L1"

SEQ ID NO: 2013 - protein, 7 aa, Artificial Sequence
  source: /note="Description of Artificial Sequence: Synthetic light chain variable region CDR L2"
GAFTRAT

SEQ ID NO: 2014 - DNA, 21 bp, Artificial Sequence
  source: /note="Description of Artificial Sequence: Synthetic light chain variable region CDR L2"
ggtgcattcaccagggccact

SEQ ID NO: 2015 - protein, 9 aa, Artificial Sequence
  source: /note="Description of Artificial Sequence: Synthetic light chain variable region CDR L3"
QQYGSSFLT

SEQ ID NO: 2016 - DNA, 27 bp, Artificial Sequence
  source: /note="Description of Artificial Sequence: Synthetic light chain variable region CDR L3"
cagcagtatggtagctcattcctcact

SEQ ID NO: 2017 - DNA, 372 bp, Artificial Sequence
  source: /note="Description of Artificial Sequence: Synthetic heavy chain variable region"
gaggtgcagctggtggagtctgggggaggcctggtcaagcctggggggtccctgagactctcctgtgcagcctctggattcaccttcagtagctatagcatgaactgggtccgccaggctccagggaaggggctggagtgggtctcatccattagtagtagtagtagttacatatactacgcagactcagtgaagggccgattcaccatctccagagacaacgccaagaactcactgtatctgcaaatgaacagcctgagagccgaggacacggctgtgtattactgtgcgagagatgtgcaatatagtggctacgattctgggtactactttgactactggggccagggaaccctggtcactgtctcctca

SEQ ID NO: 2018 - protein, 124 aa, Artificial Sequence
  source: /note="Description of Artificial Sequence: Synthetic heavy chain variable region"
EVQLVESGGGLVKPGGSLRLSCAASGFTFSSYSMNWVRQAPGKGLEWVSSISSSSSYIYYADSVKGRFTISRDNAKNSLYLQMNSLRAEDTAVYYCARDVQYSGYDSGYYFDYWGQGTLVTVSS

SEQ ID NO: 2019 - protein, 9 aa, Artificial Sequence
  source: /note="Description of Artificial Sequence: Synthetic heavy chain variable region CDR H1"
FTFSSYSMN

SEQ ID NO: 2020 - DNA, 27 bp, Artificial Sequence
  source: /note="Description of Artificial Sequence: Synthetic heavy chain variable region CDR H1"
ttcaccttcagtagctatagcatgaac

SEQ ID NO: 2021 - protein, 17 aa, Artificial Sequence
  source: /note="Description of Artificial Sequence: Synthetic heavy chain variable region CDR H2"
SISSSSSYIYYADSVKG

SEQ ID NO: 2022 - DNA, 51 bp, Artificial Sequence; identical to SEQ ID NO: 726
  source: /note="Description of Artificial Sequence: Synthetic heavy chain variable region CDR H2"

SEQ ID NO: 2023 - protein, 17 aa, Artificial Sequence
  source: /note="Description of Artificial Sequence: Synthetic heavy chain variable region CDR H3"
ARDVQYSGYDSGYYFDY

SEQ ID NO: 2024 - DNA, 51 bp, Artificial Sequence
  source: /note="Description of Artificial Sequence: Synthetic heavy chain variable region CDR H3"
gcgagagatgtgcaatatagtggctacgattctgggtactactttgactac

SEQ ID NO: 2025 - DNA, 336 bp, Artificial Sequence
  source: /note="Description of Artificial Sequence: Synthetic light chain variable region"
cagcctgtgctgactcagccaccctcagtgtctggggccccaggacagagggtcaccatctcctgcactgggagcagctccaacatcggggcaggttatgatgtacactggtaccagcagcttccaggaacagcccccaaactcctcatctatggtaacagcaatcggccctcaggggtccctgaccgattctctggctccaagtctggcacctcagcctccctggccatcactgggctccaggctgaggatgaggctgattattactgccagtcctatgacagcagcctgagtgccctttatgtcttcggaactgggaccaaggtgaccgtccta

SEQ ID NO: 2026 - protein, 112 aa, Artificial Sequence
  source: /note="Description of Artificial Sequence: Synthetic light chain variable region"
QPVLTQPPSVSGAPGQRVTISCTGSSSNIGAGYDVHWYQQLPGTAPKLLIYGNSNRPSGVPDRFSGSKSGTSASLAITGLQAEDEADYYCQSYDSSLSALYVFGTGTKVTVL

SEQ ID NO: 2027 - protein, 14 aa, Artificial Sequence
  source: /note="Description of Artificial Sequence: Synthetic light chain variable region CDR L1"
TGSSSNIGAGYDVH

SEQ ID NO: 2028 - DNA, 42 bp, Artificial Sequence; identical to SEQ ID NO: 572
  source: /note="Description of Artificial Sequence: Synthetic light chain variable region CDR L1"

SEQ ID NO: 2029 - protein, 7 aa, Artificial Sequence
  source: /note="Description of Artificial Sequence: Synthetic light chain variable region CDR L2"
GNSNRPS

SEQ ID NO: 2030 - DNA, 21 bp, Artificial Sequence
  source: /note="Description of Artificial Sequence: Synthetic light chain variable region CDR L2"
ggtaacagcaatcggccctca

SEQ ID NO: 2031 - protein, 12 aa, Artificial Sequence
  source: /note="Description of Artificial Sequence: Synthetic light chain variable region CDR L3"
QSYDSSLSALYV

SEQ ID NO: 2032 - DNA, 36 bp, Artificial Sequence
  source: /note="Description of Artificial Sequence: Synthetic light chain variable region CDR L3"
cagtcctatgacagcagcctgagtgccctttatgtc

SEQ ID NO: 2033 - DNA, 360 bp, Artificial Sequence
  source: /note="Description of Artificial Sequence: Synthetic heavy chain variable region"
gaggtgcagctggtggagtctgggggaggcgtggtccagccgggggggtccctgagactctcctgtgcaggctctggattcgccttcggtagcttcgcgatgcactgggtccgtcaggctccaggcaaggggctggagtgggtggctgttatttcatttgacggaaagaatacaaaatatgctgactccgtgaagggccgattcaccacctccagagacaattccaggaacacgctctatctccaaatggacagcctgagaggtgacgacacggctatatattactgcgcgacaattaggggaattgtggctggcctttgtgacaactggggccagggaaccctggtcaccgtctcctca

SEQ ID NO: 2034 - protein, 120 aa, Artificial Sequence
  source: /note="Description of Artificial Sequence: Synthetic heavy chain variable region"
EVQLVESGGGVVQPGGSLRLSCAGSGFAFGSFAMHWVRQAPGKGLEWVAVISFDGKNTKYADSVKGRFTTSRDNSRNTLYLQMDSLRGDDTAIYYCATIRGIVAGLCDNWGQGTLVTVSS

SEQ ID NO: 2035 - protein, 9 aa, Artificial Sequence
  source: /note="Description of Artificial Sequence: Synthetic heavy chain variable region CDR H1"
FAFGSFAMH

SEQ ID NO: 2036 - DNA, 27 bp, Artificial Sequence
  source: /note="Description of Artificial Sequence: Synthetic heavy chain variable region CDR H1"
ttcgccttcggtagcttcgcgatgcac

SEQ ID NO: 2037 - protein, 17 aa, Artificial Sequence
  source: /note="Description of Artificial Sequence: Synthetic heavy chain variable region CDR H2"
VISFDGKNTKYADSVKG

SEQ ID NO: 2038 - DNA, 51 bp, Artificial Sequence
  source: /note="Description of Artificial Sequence: Synthetic heavy chain variable region CDR H2"
gttatttcatttgacggaaagaatacaaaatatgctgactccgtgaagggc

SEQ ID NO: 2039 - protein, 13 aa, Artificial Sequence
  source: /note="Description of Artificial Sequence: Synthetic heavy chain variable region CDR H3"
ATIRGIVAGLCDN

SEQ ID NO: 2040 - DNA, 39 bp, Artificial Sequence
  source: /note="Description of Artificial Sequence: Synthetic heavy chain variable region CDR H3"
gcgacaattaggggaattgtggctggcctttgtgacaac

SEQ ID NO: 2041 - DNA, 336 bp, Artificial Sequence
  source: /note="Description of Artificial Sequence: Synthetic light chain variable region"
cagcctgtgctgactcaatcatcgtctgactctgcttccctgggagcctcggtcaagctcacctgtactctgagcagtggccacagaaactacatcatcgcatggcatcaacaacaaccagggaaggcccctcggttcctgatgaaggttgaaggtagtggaagcttcaccatggggagcggagttcctgatcgcttctcgggctccagctctggggctgaccgctacctcaccatctccaacctccagtctgaggatgaggctgattattactgtgaggcctgggactttaacacggggggggtcttcggcggaggcacccagctgaccgtcctc

SEQ ID NO: 2042 - protein, 112 aa, Artificial Sequence
  source: /note="Description of Artificial Sequence: Synthetic light chain variable region"
QPVLTQSSSDSASLGASVKLTCTLSSGHRNYIIAWHQQQPGKAPRFLMKVEGSGSFTMGSGVPDRFSGSSSGADRYLTISNLQSEDEADYYCEAWDFNTGGVFGGGTQLTVL

SEQ ID NO: 2043 - protein, 12 aa, Artificial Sequence
  source: /note="Description of Artificial Sequence: Synthetic light chain variable region CDR L1"
TLSSGHRNYIIA

SEQ ID NO: 2044 - DNA, 36 bp, Artificial Sequence
  source: /note="Description of Artificial Sequence: Synthetic light chain variable region CDR L1"
actctgagcagtggccacagaaactacatcatcgca

SEQ ID NO: 2045 - protein, 11 aa, Artificial Sequence
  source: /note="Description of Artificial Sequence: Synthetic light chain variable region CDR L2"
VEGSGSFTMGS

SEQ ID NO: 2046 - DNA, 33 bp, Artificial Sequence
  source: /note="Description of Artificial Sequence: Synthetic light chain variable region CDR L2"
gttgaaggtagtggaagcttcaccatggggagc

SEQ ID NO: 2047 - protein, 10 aa, Artificial Sequence
  source: /note="Description of Artificial Sequence: Synthetic light chain variable region CDR L3"
EAWDFNTGGV

SEQ ID NO: 2048 - DNA, 30 bp, Artificial Sequence
  source: /note="Description of Artificial Sequence: Synthetic light chain variable region CDR L3"
gaggcctgggactttaacacggggggggtc

SEQ ID NO: 2049 - DNA, 375 bp, Artificial Sequence
  source: /note="Description of Artificial Sequence: Synthetic heavy chain variable region"
gaggtgcagctggtggagtcgggcccaggactggtgaagccttcggggaccctgtccctcacctgcgctgtctctggtgactccatcgtcggtagtgactggtggagttggatccgccagccccccgggaaggggctggagtggattggagatatctatcatggtgggaccaccagctacaacccgtcccttaagagtcgagtcaccatgtcagtagacaagtccaagaaccaattctccctgaagctgacctctgtcaccgccgcggacacagccgtgtattactgtgcgagactctcgggaaattgtagtggtggtagctgttactcgccctttgaccactggggccagggaaccctggtcaccgtctcttca

SEQ ID NO: 2050 - protein, 125 aa, Artificial Sequence
  source: /note="Description of Artificial Sequence: Synthetic heavy chain variable region"
EVQLVESGPGLVKPSGTLSLTCAVSGDSIVGSDWWSWIRQPPGKGLEWIGDIYHGGTTSYNPSLKSRVTMSVDKSKNQFSLKLTSVTAADTAVYYCARLSGNCSGGSCYSPFDHWGQGTLVTVSS

SEQ ID NO: 2051 - protein, 10 aa, Artificial Sequence
  source: /note="Description of Artificial Sequence: Synthetic heavy chain variable region CDR H1"
DSIVGSDWWS

SEQ ID NO: 2052 - DNA, 30 bp, Artificial Sequence
  source: /note="Description of Artificial Sequence: Synthetic heavy chain variable region CDR H1"
gactccatcgtcggtagtgactggtggagt

SEQ ID NO: 2053 - protein, 16 aa, Artificial Sequence
  source: /note="Description of Artificial Sequence: Synthetic heavy chain variable region CDR H2"
DIYHGGTTSYNPSLKS

SEQ ID NO: 2054 - DNA, 48 bp, Artificial Sequence
  source: /note="Description of Artificial Sequence: Synthetic heavy chain variable region CDR H2"
gatatctatcatggtgggaccaccagctacaacccgtcccttaagagt

SEQ ID NO: 2055 - protein, 18 aa, Artificial Sequence
  source: /note="Description of Artificial Sequence: Synthetic heavy chain variable region CDR H3"
ARLSGNCSGGSCYSPFDH

SEQ ID NO: 2056 - DNA, 54 bp, Artificial Sequence
  source: /note="Description of Artificial Sequence: Synthetic heavy chain variable region CDR H3"
gcgagactctcgggaaattgtagtggtggtagctgttactcgccctttgaccac

SEQ ID NO: 2057 - DNA, 321 bp, Artificial Sequence
  source: /note="Description of Artificial Sequence: Synthetic light chain variable region"
gacatccagatgacccagtctccatcctccttgtctgcatctgtgggagacagagtcaccatcacttgccgggcaagtcagaccattaatggttatttaaattggtatcaacaaagaccagggaaagcccctaaactcctgatctctgctgcatccagtttgcagagtggggtcccatcaaggttccgtggcagtggatatgggacagatttcactctcaccatcagcagtctgcaacctgaagattttgcaacttatttctgtcaacagagttacaatactgtgtacacttttgggcaggggaccaaagtggatatcaaa

SEQ ID NO: 2058 - protein, 107 aa, Artificial Sequence
  source: /note="Description of Artificial Sequence: Synthetic light chain variable region"
DIQMTQSPSSLSASVGDRVTITCRASQTINGYLNWYQQRPGKAPKLLISAASSLQSGVPSRFRGSGYGTDFTLTISSLQPEDFATYFCQQSYNTVYTFGQGTKVDIK

SEQ ID NO: 2059 - protein, 11 aa, Artificial Sequence
  source: /note="Description of Artificial Sequence: Synthetic light chain variable region CDR L1"
RASQTINGYLN

SEQ ID NO: 2060 - DNA, 33 bp, Artificial Sequence
  source: /note="Description of Artificial Sequence: Synthetic light chain variable region CDR L1"
cgggcaagtcagaccattaatggttatttaaat

SEQ ID NO: 2061 - protein, 7 aa, Artificial Sequence
  source: /note="Description of Artificial Sequence: Synthetic light chain variable region CDR L2"
AASSLQS

SEQ ID NO: 2062 - DNA, 21 bp, Artificial Sequence
  source: /note="Description of Artificial Sequence: Synthetic light chain variable region CDR L2"
gctgcatccagtttgcagagt

SEQ ID NO: 2063 - protein, 9 aa, Artificial Sequence
  source: /note="Description of Artificial Sequence: Synthetic light chain variable region CDR L3"
QQSYNTVYT

SEQ ID NO: 2064 - DNA, 27 bp, Artificial Sequence
  source: /note="Description of Artificial Sequence: Synthetic light chain variable region CDR L3"
caacagagttacaatactgtgtacact

SEQ ID NO: 2065 - DNA, 357 bp, Artificial Sequence
  source: /note="Description of Artificial Sequence: Synthetic heavy chain variable region"
caggtgcagctggtgcagtctggagcagaggtgaaaaagcccggggagtctctgaagatctcctgtaagggttctggatacagctttagcagctactggatcggctgggtgcgccagatgcccgggaaaggcctggagtggatggggatcatctatcctggtgactctgataccagatacagcccgtcgctccaaggccaggtcaccatctcaggcgacaagtccatcagtaccgccttcctgcagtggagcagcctgaaggcctcggacaccgccatgtattactgtgcgagacccatgactacccaagaaggttttgatttgtggggccaagggacaatggtcaccgtctcttca

SEQ ID NO: 2066 - protein, 119 aa, Artificial Sequence
  source: /note="Description of Artificial Sequence: Synthetic heavy chain variable region"
QVQLVQSGAEVKKPGESLKISCKGSGYSFSSYWIGWVRQMPGKGLEWMGIIYPGDSDTRYSPSLQGQVTISGDKSISTAFLQWSSLKASDTAMYYCARPMTTQEGFDLWGQGTMVTVSS

SEQ ID NO: 2067 - protein, 9 aa, Artificial Sequence
  source: /note="Description of Artificial Sequence: Synthetic heavy chain variable region CDR H1"
YSFSSYWIG

SEQ ID NO: 2068 - DNA, 27 bp, Artificial Sequence
  source: /note="Description of Artificial Sequence: Synthetic heavy chain variable region CDR H1"
tacagctttagcagctactggatcggc

SEQ ID NO: 2069 - protein, 17 aa, Artificial Sequence
  source: /note="Description of Artificial Sequence: Synthetic heavy chain variable region CDR H2"
IIYPGDSDTRYSPSLQG

SEQ ID NO: 2070 - DNA, 51 bp, Artificial Sequence
  source: /note="Description of Artificial Sequence: Synthetic heavy chain variable region CDR H2"
atcatctatcctggtgactctgataccagatacagcccgtcgctccaaggc

SEQ ID NO: 2071 - protein, 12 aa, Artificial Sequence
  source: /note="Description of Artificial Sequence: Synthetic heavy chain variable region CDR H3"
ARPMTTQEGFDL

SEQ ID NO: 2072 - DNA, 36 bp, Artificial Sequence
  source: /note="Description of Artificial Sequence: Synthetic heavy chain variable region CDR H3"
gcgagacccatgactacccaagaaggttttgatttg

SEQ ID NO: 2073 - DNA, 324 bp, Artificial Sequence
  source: /note="Description of Artificial Sequence: Synthetic light chain variable region"
gacatccggttgacccagtctccatcttctgtgtctgcatctgtaggagacagagtcaccatcacttgtcgggcgagtcagggtattagcgactggttagcctggtatcagcagaaaccagggaaagcccctaaactcctgatctatgctgcatccagtttgcaaagtggggtcccatcaaggttcagcggcagtggatctgggacagatttcactctcactatcagcagcctgcagcctgaagattttgcaacttactattgtcaacagactaacagtttcctcccgctcactttcggcggagggaccaaagtggatatcaaa

SEQ ID NO: 2074 - protein, 108 aa, Artificial Sequence
  source: /note="Description of Artificial Sequence: Synthetic light chain variable region"
DIRLTQSPSSVSASVGDRVTITCRASQGISDWLAWYQQKPGKAPKLLIYAASSLQSGVPSRFSGSGSGTDFTLTISSLQPEDFATYYCQQTNSFLPLTFGGGTKVDIK

SEQ ID NO: 2075 - protein, 11 aa, Artificial Sequence
  source: /note="Description of Artificial Sequence: Synthetic light chain variable region CDR L1"
RASQGISDWLA

SEQ ID NO: 2076 - DNA, 33 bp, Artificial Sequence
  source: /note="Description of Artificial Sequence: Synthetic light chain variable region CDR L1"
cgggcgagtcagggtattagcgactggttagcc

SEQ ID NO: 2077 - protein, 7 aa, Artificial Sequence
  source: /note="Description of Artificial Sequence: Synthetic light chain variable region CDR L2"
AASSLQS

SEQ ID NO: 2078 - DNA, 21 bp, Artificial Sequence
  source: /note="Description of Artificial Sequence: Synthetic light chain variable region CDR L2"
gctgcatccagtttgcaaagt

SEQ ID NO: 2079 - protein, 10 aa, Artificial Sequence
  source: /note="Description of Artificial Sequence: Synthetic light chain variable region CDR L3"
QQTNSFLPLT

SEQ ID NO: 2080 - DNA, 30 bp, Artificial Sequence
  source: /note="Description of Artificial Sequence: Synthetic light chain variable region CDR L3"
caacagactaacagtttcctcccgctcact

SEQ ID NO: 2081 - DNA, 378 bp, Artificial Sequence
  source: /note="Description of Artificial Sequence: Synthetic heavy chain variable region"
gaggtgcagctggtggagtcgggcccccgactggtgaagccttcacagaccctgtccctcacctgcaccgtctatggtggctccatcagcggtggtcaaaactactacagttgggtccgccagcccccagggaagggcctggagtggattgggtacatcttttccagtgggaccacctactacaagccgtccctcaagagtcgaatttccatttcatttgacacgtccaagaaccagttctccctgaacctggcctctgtgacggccgcagacacggccgtatatttctgtgccagatccgctgacattgatatcgtttgggggagttctctctacatgcctctctggggccagggaaccctggtcaccgtctcctca

SEQ ID NO: 2082 - protein, 126 aa, Artificial Sequence
  source: /note="Description of Artificial Sequence: Synthetic heavy chain variable region"
EVQLVESGPRLVKPSQTLSLTCTVYGGSISGGQNYYSWVRQPPGKGLEWIGYIFSSGTTYYKPSLKSRISISFDTSKNQFSLNLASVTAADTAVYFCARSADIDIVWGSSLYMPLWGQGTLVTVSS

SEQ ID NO: 2083 - protein, 11 aa, Artificial Sequence
  source: /note="Description of Artificial Sequence: Synthetic heavy chain variable region CDR H1"
GSISGGQNYYS

SEQ ID NO: 2084 - DNA, 33 bp, Artificial Sequence
  source: /note="Description of Artificial Sequence: Synthetic heavy chain variable region CDR H1"
ggctccatcagcggtggtcaaaactactacagt

SEQ ID NO: 2085 - protein, 16 aa, Artificial Sequence
  source: /note="Description of Artificial Sequence: Synthetic heavy chain variable region CDR H2"
YIFSSGTTYYKPSLKS

SEQ ID NO: 2086 - DNA, 48 bp, Artificial Sequence
  source: /note="Description of Artificial Sequence: Synthetic heavy chain variable region CDR H2"
tacatcttttccagtgggaccacctactacaagccgtccctcaagagt

SEQ ID NO: 2087 - protein, 18 aa, Artificial Sequence
  source: /note="Description of Artificial Sequence: Synthetic heavy chain variable region CDR H3"
ARSADIDIVWGSSLYMPL

SEQ ID NO: 2088 - DNA, 54 bp, Artificial Sequence
  source: /note="Description of Artificial Sequence: Synthetic heavy chain variable region CDR H3"
gccagatccgctgacattgatatcgtttgggggagttctctctacatgcctctc

SEQ ID NO: 2089 - DNA, 324 bp, Artificial Sequence
  source: /note="Description of Artificial Sequence: Synthetic light chain variable region"
gaaattgtgttgacgcagtctccaggcaccctgtctttgtctccaggacaaagagccaccctctcctgcagggccactcacattgtcagtaacagctacttagcctggtaccagcagaaacctggccaggctcccaggctcctcatccatggtgtttccatcagggccactggcatcccagacaggttctctggcagtgggtctgggacagacttcactctcaccatcagcagactggagcctgaagattttgcagtgtatttctgtcagcagtatggtacctcaccgtggacgttcggccaagggaccaagctggagatcaaa

SEQ ID NO: 2090 - protein, 108 aa, Artificial Sequence
  source: /note="Description of Artificial Sequence: Synthetic light chain variable region"
EIVLTQSPGTLSLSPGQRATLSCRATHIVSNSYLAWYQQKPGQAPRLLIHGVSIRATGIPDRFSGSGSGTDFTLTISRLEPEDFAVYFCQQYGTSPWTFGQGTKLEIK

SEQ ID NO: 2091 - protein, 12 aa, Artificial Sequence
  source: /note="Description of Artificial Sequence: Synthetic light chain variable region CDR L1"
RATHIVSNSYLA

SEQ ID NO: 2092 - DNA, 36 bp, Artificial Sequence
  source: /note="Description of Artificial Sequence: Synthetic light chain variable region CDR L1"
agggccactcacattgtcagtaacagctacttagcc

SEQ ID NO: 2093 - protein, 7 aa, Artificial Sequence
  source: /note="Description of Artificial Sequence: Synthetic light chain variable region CDR L2"
GVSIRAT

SEQ ID NO: 2094 - DNA, 21 bp, Artificial Sequence
  source: /note="Description of Artificial Sequence: Synthetic light chain variable region CDR L2"
ggtgtttccatcagggccact

SEQ ID NO: 2095 - protein, 9 aa, Artificial Sequence
  source: /note="Description of Artificial Sequence: Synthetic light chain variable region CDR L3"
QQYGTSPWT

SEQ ID NO: 2096 - DNA, 27 bp, Artificial Sequence
  source: /note="Description of Artificial Sequence: Synthetic light chain variable region CDR L3"
cagcagtatggtacctcaccgtggacg

SEQ ID NO: 2097 - DNA, 372 bp, Artificial Sequence
  source: /note="Description of Artificial Sequence: Synthetic heavy chain variable region"
caggtgcagctggtggagtctgggggaggcctggtcaagccgggggggtccctgagactctcctgtgtagcctctggatttaccttcagcagttatgccatgaattgggtccgccaggctccagggaaggggctggactgggtctcctctatcagtgctggtagcaatttcatagacgacgcagactcagtgaagggccgcttcaccatctccagagacaacgccaggaactcactgtttctgcagatgaacagcctgagagccgaggacacggctgtgtattactgtgcgagaattgggtacagtagcgcgcaccactaccagtactacatggacgtctggggcacggggaccacggtcaccgtctcctca

SEQ ID NO: 2098 - protein, 124 aa, Artificial Sequence
  source: /note="Description of Artificial Sequence: Synthetic heavy chain variable region"
QVQLVESGGGLVKPGGSLRLSCVASGFTFSSYAMNWVRQAPGKGLDWVSSISAGSNFIDDADSVKGRFTISRDNARNSLFLQMNSLRAEDTAVYYCARIGYSSAHHYQYYMDVWGTGTTVTVSS

SEQ ID NO: 2099 - protein, 9 aa, Artificial Sequence
  source: /note="Description of Artificial Sequence: Synthetic heavy chain variable region CDR H1"
FTFSSYAMN

SEQ ID NO: 2100 - DNA, 27 bp, Artificial Sequence
  source: /note="Description of Artificial Sequence: Synthetic heavy chain variable region CDR H1"
tttaccttcagcagttatgccatgaat

SEQ ID NO: 2101 - protein, 17 aa, Artificial Sequence
  source: /note="Description of Artificial Sequence: Synthetic heavy chain variable region CDR H2"
SISAGSNFIDDADSVKG

SEQ ID NO: 2102 - DNA, 51 bp, Artificial Sequence
  source: /note="Description of Artificial Sequence: Synthetic heavy chain variable region CDR H2"
tctatcagtgctggtagcaatttcatagacgacgcagactcagtgaagggc

SEQ ID NO: 2103 - protein, 17 aa, Artificial Sequence
  source: /note="Description of Artificial Sequence: Synthetic heavy chain variable region CDR H3"
ARIGYSSAHHYQYYMDV

SEQ ID NO: 2104 - DNA, 51 bp, Artificial Sequence
  source: /note="Description of Artificial Sequence: Synthetic heavy chain variable region CDR H3"
gcgagaattgggtacagtagcgcgcaccactaccagtactacatggacgtc

SEQ ID NO: 2105 - DNA, 336 bp, Artificial Sequence
  source: /note="Description of Artificial Sequence: Synthetic light chain variable region"
cagtctgtcctgacgcagccgccctcagtgtctggggccccagggcagagggtcaccatctcctgcactggcagcagctccaacatcggggcaggttatgatgtccactggtaccaggatcttccaggaactgcccccaaactcctcatctatggtaacaccaatcggccctcaggggtccctgaccgattctctggctccaagtctggcgcctcagcctccctggtcatcactgggctccaggctgaggatgaggctgattattactgccagtcctatgacaagagcctgagtggtgggtatgtcttcggaactgggaccaaggtcaccgtccta

SEQ ID NO: 2106 - protein, 112 aa, Artificial Sequence
  source: /note="Description of Artificial Sequence: Synthetic light chain variable region"
QSVLTQPPSVSGAPGQRVTISCTGSSSNIGAGYDVHWYQDLPGTAPKLLIYGNTNRPSGVPDRFSGSKSGASASLVITGLQAEDEADYYCQSYDKSLSGGYVFGTGTKVTVL

SEQ ID NO: 2107 - protein, 14 aa, Artificial Sequence
  source: /note="Description of Artificial Sequence: Synthetic light chain variable region CDR L1"
TGSSSNIGAGYDVH

SEQ ID NO: 2108 - DNA, 42 bp, Artificial Sequence
  source: /note="Description of Artificial Sequence: Synthetic light chain variable region CDR L1"
actggcagcagctccaacatcggggcaggttatgatgtccac

SEQ ID NO: 2109 - protein, 7 aa, Artificial Sequence
  source: /note="Description of Artificial Sequence: Synthetic light chain variable region CDR L2"
GNTNRPS

SEQ ID NO: 2110 - DNA, 21 bp, Artificial Sequence
  source: /note="Description of Artificial Sequence: Synthetic light chain variable region CDR L2"
ggtaacaccaatcggccctca

SEQ ID NO: 2111 - protein, 12 aa, Artificial Sequence
  source: /note="Description of Artificial Sequence: Synthetic light chain variable region CDR L3"
QSYDKSLSGGYV

SEQ ID NO: 2112 - DNA, 36 bp, Artificial Sequence
  source: /note="Description of Artificial Sequence: Synthetic light chain variable region CDR L3"
cagtcctatgacaagagcctgagtggtgggtatgtc

SEQ ID NO: 2113 - DNA, 363 bp, Artificial Sequence
  source: /note="Description of Artificial Sequence: Synthetic heavy chain variable region"
caggtccagctggtgcagtctggggctgaggtgaagaagcctggggcctcagtgagggtcacctgcaaggcctctggatacaccttcaccgactactttatgaactgggtgcgacaggcccctggagggggccttgagtggatggggtggatcaatcctctcagtggagtcacaaaatatgcacagcagtttcagggcagtgtcaccatgaccactgacacgtccatcaccacaggctacatggagctgaggagcctgagagttgacgacacggccgtctattattgtgcgagccagtcttccccttacaccccgggcgccatgggcgtctggggccaagggaccacggtcaccgtctcttca

SEQ ID NO: 2114 - protein, 121 aa, Artificial Sequence
  source: /note="Description of Artificial Sequence: Synthetic heavy chain variable region"
QVQLVQSGAEVKKPGASVRVTCKASGYTFTDYFMNWVRQAPGGGLEWMGWINPLSGVTKYAQQFQGSVTMTTDTSITTGYMELRSLRVDDTAVYYCASQSSPYTPGAMGVWGQGTTVTVSS

SEQ ID NO: 2115 - protein, 9 aa, Artificial Sequence
  source: /note="Description of Artificial Sequence: Synthetic heavy chain variable region CDR H1"
YTFTDYFMN

SEQ ID NO: 2116 - DNA, 27 bp, Artificial Sequence
  source: /note="Description of Artificial Sequence: Synthetic heavy chain variable region CDR H1"
tacaccttcaccgactactttatgaac

SEQ ID NO: 2117 - protein, 17 aa, Artificial Sequence
  source: /note="Description of Artificial Sequence: Synthetic heavy chain variable region CDR H2"
WINPLSGVTKYAQQFQG

SEQ ID NO: 2118 - DNA, 51 bp, Artificial Sequence; identical to SEQ ID NO: 1942
  source: /note="Description of Artificial Sequence: Synthetic heavy chain variable region CDR H2"

SEQ ID NO: 2119 - protein, 14 aa, Artificial Sequence
  source: /note="Description of Artificial Sequence: Synthetic heavy chain variable region CDR H3"
ASQSSPYTPGAMGV

SEQ ID NO: 2120 - DNA, 42 bp, Artificial Sequence; identical to SEQ ID NO: 1944
  source: /note="Description of Artificial Sequence: Synthetic heavy chain variable region CDR H3"

SEQ ID NO: 2121 - DNA, 327 bp, Artificial Sequence
  source: /note="Description of Artificial Sequence: Synthetic light chain variable region"
tcctatgagctgatacagctaccctcggtgtcagtgtccccaggacagacggccaggatcacctgctctggagatgcattgccaaagcaatatgcttattggtaccagcagaagccaggccaggcccctgtgctggtgatatataaagacagtgagaggccctcagggatccctgagcgattctctggctccagctcagggacaacagtcacgttgaccatcagtggagtccaggcagaagacgaggctgactattactgtcaatcagcagacagcagtggtacttatccggtggtgttcggcggagggaccaagctcaccgtccta

SEQ ID NO: 2122 - protein, 109 aa, Artificial Sequence
  source: /note="Description of Artificial Sequence: Synthetic light chain variable region"
SYELIQLPSVSVSPGQTARITCSGDALPKQYAYWYQQKPGQAPVLVIYKDSERPSGIPERFSGSSSGTTVTLTISGVQAEDEADYYCQSADSSGTYPVVFGGGTKLTVL

SEQ ID NO: 2123 - protein, 11 aa, Artificial Sequence
  source: /note="Description of Artificial Sequence: Synthetic light chain variable region CDR L1"
SGDALPKQYAY

SEQ ID NO: 2124 - DNA, 33 bp, Artificial Sequence
  source: /note="Description of Artificial Sequence: Synthetic light chain variable region CDR L1"
tctggagatgcattgccaaagcaatatgcttat

SEQ ID NO: 2125 - protein, 7 aa, Artificial Sequence
  source: /note="Description of Artificial Sequence: Synthetic light chain variable region CDR L2"
KDSERPS

SEQ ID NO: 2126 - DNA, 21 bp, Artificial Sequence
  source: /note="Description of Artificial Sequence: Synthetic light chain variable region CDR L2"
aaagacagtgagaggccctca

SEQ ID NO: 2127 - protein, 12 aa, Artificial Sequence
  source: /note="Description of Artificial Sequence: Synthetic light chain variable region CDR L3"
QSADSSGTYPVV

SEQ ID NO: 2128 - DNA, 36 bp, Artificial Sequence
  source: /note="Description of Artificial Sequence: Synthetic light chain variable region CDR L3"
caatcagcagacagcagtggtacttatccggtggtg

SEQ ID NO: 2129 - DNA, 366 bp, Artificial Sequence
  source: /note="Description of Artificial Sequence: Synthetic heavy chain variable region"
gaggtgcagctggtggagtcgggcccaggactggtggagccttcggagaccctgtccctcacctgcactgtctctggtgcctccatcagcagtagtgaatactactggggctggatccgccagcccccagggaaggggctggagtggattgggactttctattatagtgggagcacctactacaacccgtccctcaagagtcgagtcaccatatccgaagacacgtccaagaatcagctctccctgaagttgagctctgtgaccgccgtagacacggctgtgtattactgtgcgagacacagcagatccgacgtccggaactacttcgacccctggggccagggaaccctggtcaccgtctcctca

SEQ ID NO: 2130 - protein, 122 aa, Artificial Sequence
  source: /note="Description of Artificial Sequence: Synthetic heavy chain variable region"
EVQLVESGPGLVEPSETLSLTCTVSGASISSSEYYWGWIRQPPGKGLEWIGTFYYSGSTYYNPSLKSRVTISEDTSKNQLSLKLSSVTAVDTAVYYCARHSRSDVRNYFDPWGQGTLVTVSS

SEQ ID NO: 2131 - protein, 11 aa, Artificial Sequence
  source: /note="Description of Artificial Sequence: Synthetic heavy chain variable region CDR H1"
ASISSSEYYWG

SEQ ID NO: 2132 - DNA, 33 bp, Artificial Sequence
  source: /note="Description of Artificial Sequence: Synthetic heavy chain variable region CDR H1"
gcctccatcagcagtagtgaatactactggggc

SEQ ID NO: 2133 - protein, 16 aa, Artificial Sequence
  source: /note="Description of Artificial Sequence: Synthetic heavy chain variable region CDR H2"
TFYYSGSTYYNPSLKS

SEQ ID NO: 2134 - DNA, 48 bp, Artificial Sequence
  source: /note="Description of Artificial Sequence: Synthetic heavy chain variable region CDR H2"
actttctattatagtgggagcacctactacaacccgtccctcaagagt

SEQ ID NO: 2135 - protein, 14 aa, Artificial Sequence
  source: /note="Description of Artificial Sequence: Synthetic heavy chain variable region CDR H3"
ARHSRSDVRNYFDP

SEQ ID NO: 2136 - DNA, 42 bp, Artificial Sequence
  source: /note="Description of Artificial Sequence: Synthetic heavy chain variable region CDR H3"
gcgagacacagcagatccgacgtccggaactacttcgacccc

SEQ ID NO: 2137 - DNA, 321 bp, Artificial Sequence
  source: /note="Description of Artificial Sequence: Synthetic light chain variable region"
gaaattgtgatgacacagtctccatcctccctgtctgcagctgtaggagacagcgtcaccatcacttgccgggcaagtcagagcatcagcaactatttaaattggtatcagcagaaatcagggaaagcccctaagctcctgatctatgctgcatccagtttgcaaagtggggtcccatcaaggttcagtggcagtggatctgggacagatttcactctcactatcagcagtctgcaacctgaagatttttcaacttactactgtcaacagagtcacagtacccccgccacttttggcctggggaccaaagtggatatcaaa

SEQ ID NO: 2138 - protein, 107 aa, Artificial Sequence
  source: /note="Description of Artificial Sequence: Synthetic light chain variable region"
EIVMTQSPSSLSAAVGDSVTITCRASQSISNYLNWYQQKSGKAPKLLIYAASSLQSGVPSRFSGSGSGTDFTLTISSLQPEDFSTYYCQQSHSTPATFGLGTKVDIK

SEQ ID NO: 2139 - protein, 11 aa, Artificial Sequence
  source: /note="Description of Artificial Sequence: Synthetic light chain variable region CDR L1"
RASQSISNYLN

SEQ ID NO: 2140 - DNA, 33 bp, Artificial Sequence
  source: /note="Description of Artificial Sequence: Synthetic light chain variable region CDR L1"
cgggcaagtcagagcatcagcaactatttaaat

SEQ ID NO: 2141 - protein, 7 aa, Artificial Sequence
  source: /note="Description of Artificial Sequence: Synthetic light chain variable region CDR L2"
AASSLQS

SEQ ID NO: 2142 - DNA, 21 bp, Artificial Sequence
  source: /note="Description of Artificial Sequence: Synthetic light chain variable region CDR L2"
gctgcatccagtttgcaaagt

SEQ ID NO: 2143 - protein, 9 aa, Artificial Sequence
  source: /note="Description of Artificial Sequence: Synthetic light chain variable region CDR L3"
QQSHSTPAT

SEQ ID NO: 2144 - DNA, 27 bp, Artificial Sequence
  source: /note="Description of Artificial Sequence: Synthetic light chain variable region CDR L3"
caacagagtcacagtacccccgccact

SEQ ID NO: 2145 - DNA, 366 bp, Artificial Sequence; identical to SEQ ID NO: 561
  source: /note="Description of Artificial Sequence: Synthetic Heavy chain variable region ('HC') nucleic acid sequence"

SEQ ID NO: 2146 - protein, 122 aa, Artificial Sequence; identical to SEQ ID NO: 562
  source: /note="Description of Artificial Sequence: Synthetic Heavy chain variable region ('HC') amino acid sequence"

SEQ ID NO: 2147 - protein, 9 aa, Artificial Sequence
  source: /note="Description of Artificial Sequence: Synthetic Heavy chain variable region CDR H1 ('H1') amino acid sequence"
FSFRSYSMN

SEQ ID NO: 2148 - protein, 17 aa, Artificial Sequence
  source: /note="Description of Artificial Sequence: Synthetic Heavy chain variable region CDR H2 ('H2') amino acid sequence"
SISSSSNYINYADSVKG

SEQ ID NO: 2149 - protein, 15 aa, Artificial Sequence
  source: /note="Description of Artificial Sequence: Synthetic Heavy chain variable region CDR H3 ('H3') amino acid sequence"
ARDLLPVERGPAFDI

SEQ ID NO: 2150 - DNA, 333 bp, Artificial Sequence
  source: /note="Description of Artificial Sequence: Synthetic Light chain variable region('LC') nucleic acid sequence"
tcctacgagctgacacagccaccctcagtgtctggggccccagggcagagggtcactatctcctgcactgggagcagctccaacatcgggaggggttatgatgtacactggttccagcagcttccaggagcagcccccaaactcctcatctatgctaacagcaatcggccctcaggggtccctgaccgattctctggctccaagtctggcacctcagcctccctggccatcactgggctccaggctgaggatgaggctgattattactgccagtcctatgacagcagactgggtggttcggtattcggcggagggaccaaggtgaccgtccta

SEQ ID NO: 2151 - protein, 111 aa, Artificial Sequence
  source: /note="Description of Artificial Sequence: Synthetic Light chain variable region ('LC') amino acid sequence"
SYELTQPPSVSGAPGQRVTISCTGSSSNIGRGYDVHWFQQLPGAAPKLLIYANSNRPSGVPDRFSGSKSGTSASLAITGLQAEDEADYYCQSYDSRLGGSVFGGGTKVTVL

SEQ ID NO: 2152 - protein, 14 aa, Artificial Sequence
  source: /note="Description of Artificial Sequence: Synthetic Light chain variable region CDR L1 ('L1') amino acid sequence"
TGSSSNIGRGYDVH

SEQ ID NO: 2153 - protein, 7 aa, Artificial Sequence
  source: /note="Description of Artificial Sequence: Synthetic Light chain variable region CDR L2 ('L2') amino acid sequence"
ANSNRPS

SEQ ID NO: 2154 - protein, 11 aa, Artificial Sequence
  source: /note="Description of Artificial Sequence: Synthetic Light chain variable region CDR L3 ('L3') amino acid sequence"
QSYDSRLGGSV

SEQ ID NO: 2155 - DNA, 366 bp, Artificial Sequence; identical to SEQ ID NO: 561
  source: /note="Description of Artificial Sequence: Synthetic Heavy chain variable region ('HC') nucleic acid sequence"

SEQ ID NO: 2156 - protein, 122 aa, Artificial Sequence; identical to SEQ ID NO: 562
  source: /note="Description of Artificial Sequence: Synthetic Heavy chain variable region ('HC') amino acid sequence"

SEQ ID NO: 2157 - protein, 9 aa, Artificial Sequence
  source: /note="Description of Artificial Sequence: Synthetic Heavy chain variable region CDR H1 ('H1') amino acid sequence"
FSFRSYSMN

SEQ ID NO: 2158 - protein, 17 aa, Artificial Sequence
  source: /note="Description of Artificial Sequence: Synthetic Heavy chain variable region CDR H2 ('H2') amino acid sequence"
SISSSSNYINYADSVKG

SEQ ID NO: 2159 - protein, 15 aa, Artificial Sequence
  source: /note="Description of Artificial Sequence: Synthetic Heavy chain variable region CDR H3 ('H3') amino acid sequence"
ARDLLPVERGPAFDI

SEQ ID NO: 2160 - DNA, 333 bp, Artificial Sequence
  source: /note="Description of Artificial Sequence: Synthetic Light chain variable region('LC') nucleic acid sequence"
tcctatgagctgacacagccaccctcagtgtctggggccccagggcagagggtcaccatctcctgcactgggagcagctccaacatcggggcaggttatgatgtacactggttccagcagcttccaggagcagcccccaaactcctcatctatcgtaacagcaatcggccctcaggggtccctgaccgattctctggctccaagtctggcacctcagcctccctggccatcactgggctccaggctgaggatgaggctgattattactgccagtcctatgacagcagactgggtggttcgaatttcggcggagggaccaaggtgaccgtccta

SEQ ID NO: 2161 - protein, 111 aa, Artificial Sequence
  source: /note="Description of Artificial Sequence: Synthetic Light chain variable region ('LC') amino acid sequence"
SYELTQPPSVSGAPGQRVTISCTGSSSNIGAGYDVHWFQQLPGAAPKLLIYRNSNRPSGVPDRFSGSKSGTSASLAITGLQAEDEADYYCQSYDSRLGGSNFGGGTKVTVL

SEQ ID NO: 2162 - protein, 14 aa, Artificial Sequence
  source: /note="Description of Artificial Sequence: Synthetic Light chain variable region CDR L1 ('L1') amino acid sequence"
TGSSSNIGAGYDVH

SEQ ID NO: 2163 - protein, 7 aa, Artificial Sequence
  source: /note="Description of Artificial Sequence: Synthetic Light chain variable region CDR L2 ('L2') amino acid sequence"
RNSNRPS

SEQ ID NO: 2164 - protein, 11 aa, Artificial Sequence
  source: /note="Description of Artificial Sequence: Synthetic Light chain variable region CDR L3 ('L3') amino acid sequence"
QSYDSRLGGSN

SEQ ID NO: 2165 - DNA, 366 bp, Artificial Sequence
  source: /note="Description of Artificial Sequence: Synthetic Heavy chain variable region ('HC') nucleic acid sequence"
gaggtgcagctggtggagtctgggggaggcctggtcaagcctgggggggccctgagactctcctgtgcagcctctggattcagcttcaggagctatagcatgaactgggtccgccaggctccagggaaggggctggagtgggtctcatccattagtgctagtagtaattacataaactacgcagactcagtgaagggccgattcagcatctccagagacaacgccaagaactcactgtatctgcaaatgaacagcctgagagccgaggacacggctgtctattactgtgcgagagatttgttacccgtcgagcggggtcccgcttttgatatctggggccaagggacaatggtcaccgtctcttca

SEQ ID NO: 2166 - protein, 122 aa, Artificial Sequence
  source: /note="Description of Artificial Sequence: Synthetic Heavy chain variable region ('HC') amino acid sequence"
EVQLVESGGGLVKPGGALRLSCAASGFSFRSYSMNWVRQAPGKGLEWVSSISASSNYINYADSVKGRFSISRDNAKNSLYLQMNSLRAEDTAVYYCARDLLPVERGPAFDIWGQGTMVTVSS

SEQ ID NO: 2167 - protein, 9 aa, Artificial Sequence
  source: /note="Description of Artificial Sequence: Synthetic Heavy chain variable region CDR H1 ('H1') amino acid sequence"
FSFRSYSMN

SEQ ID NO: 2168 - protein, 17 aa, Artificial Sequence
  source: /note="Description of Artificial Sequence: Synthetic Heavy chain variable region CDR H2 ('H2') amino acid sequence"
SISASSNYINYADSVKG

SEQ ID NO: 2169 - protein, 15 aa, Artificial Sequence
  source: /note="Description of Artificial Sequence: Synthetic Heavy chain variable region CDR H3 ('H3') amino acid sequence"
ARDLLPVERGPAFDI

SEQ ID NO: 2170 - DNA, 333 bp, Artificial Sequence; identical to SEQ ID NO: 569
  source: /note="Description of Artificial Sequence: Synthetic Light chain variable region('LC') nucleic acid sequence"

SEQ ID NO: 2171 - protein, 111 aa, Artificial Sequence; identical to SEQ ID NO: 570
  source: /note="Description of Artificial Sequence: Synthetic Light chain variable region ('LC') amino acid sequence"

SEQ ID NO: 2172 - protein, 14 aa, Artificial Sequence
  source: /note="Description of Artificial Sequence: Synthetic Light chain variable region CDR L1 ('L1') amino acid sequence"
TGSSSNIGAGYDVH

SEQ ID NO: 2173 - protein, 7 aa, Artificial Sequence
  source: /note="Description of Artificial Sequence: Synthetic Light chain variable region CDR L2 ('L2') amino acid sequence"
ANSNRPS

SEQ ID NO: 2174 - protein, 11 aa, Artificial Sequence
  source: /note="Description of Artificial Sequence: Synthetic Light chain variable region CDR L3 ('L3') amino acid sequence"
QSYDSRLGGSV

SEQ ID NO: 2175 - DNA, 366 bp, Artificial Sequence
  source: /note="Description of Artificial Sequence: Synthetic Heavy chain variable region ('HC') nucleic acid sequence"
gaggtgcagctggtggagtctgggggaggcctggtcaagcctgggggggccctgagactctcctgtgcagcctctggattcagcttcaggagctatagcatgaactgggtccgccaggctccagggaaggggctggagtgggtctcatccattagtagtagtagtacttacataaactacgcagactcagtgaagggccgattcagcatctccagagacaacgccaagaactcactgtatctgcaaatgaacagcctgagagccgaggacacggctgtctattactgtgcgagagatttgagtcccgtcgagcggggtcccgcttttgatatctggggccaagggacaatggtcaccgtctcttca

SEQ ID NO: 2176 - protein, 122 aa, Artificial Sequence
  source: /note="Description of Artificial Sequence: Synthetic Heavy chain variable region ('HC') amino acid sequence"
EVQLVESGGGLVKPGGALRLSCAASGFSFRSYSMNWVRQAPGKGLEWVSSISSSSTYINYADSVKGRFSISRDNAKNSLYLQMNSLRAEDTAVYYCARDLSPVERGPAFDIWGQGTMVTVSS

SEQ ID NO: 2177 - protein, 9 aa, Artificial Sequence
  source: /note="Description of Artificial Sequence: Synthetic Heavy chain variable region CDR H1 ('H1') amino acid sequence"
FSFRSYSMN

SEQ ID NO: 2178 - protein, 17 aa, Artificial Sequence
  source: /note="Description of Artificial Sequence: Synthetic Heavy chain variable region CDR H2 ('H2') amino acid sequence"
SISSSSTYINYADSVKG

SEQ ID NO: 2179 - protein, 15 aa, Artificial Sequence
  source: /note="Description of Artificial Sequence: Synthetic Heavy chain variable region CDR H3 ('H3') amino acid sequence"
ARDLSPVERGPAFDI

SEQ ID NO: 2180 - DNA, 333 bp, Artificial Sequence; identical to SEQ ID NO: 569
  source: /note="Description of Artificial Sequence: Synthetic Light chain variable region('LC') nucleic acid sequence"

SEQ ID NO: 2181 - protein, 111 aa, Artificial Sequence; identical to SEQ ID NO: 570
  source: /note="Description of Artificial Sequence: Synthetic Light chain variable region ('LC') amino acid sequence"

SEQ ID NO: 2182 - protein, 14 aa, Artificial Sequence
  source: /note="Description of Artificial Sequence: Synthetic Light chain variable region CDR L1 ('L1') amino acid sequence"
TGSSSNIGAGYDVH

SEQ ID NO: 2183 - protein, 7 aa, Artificial Sequence
  source: /note="Description of Artificial Sequence: Synthetic Light chain variable region CDR L2 ('L2') amino acid sequence"
ANSNRPS

SEQ ID NO: 2184 - protein, 11 aa, Artificial Sequence
  source: /note="Description of Artificial Sequence: Synthetic Light chain variable region CDR L3 ('L3') amino acid sequence"
QSYDSRLGGSV

SEQ ID NO: 2185 - DNA, 366 bp, Artificial Sequence; identical to SEQ ID NO: 2165
  source: /note="Description of Artificial Sequence: Synthetic Heavy chain variable region ('HC') nucleic acid sequence"

SEQ ID NO: 2186 - protein, 122 aa, Artificial Sequence; identical to SEQ ID NO: 2166
  source: /note="Description of Artificial Sequence: Synthetic Heavy chain variable region ('HC') amino acid sequence"

SEQ ID NO: 2187 - protein, 9 aa, Artificial Sequence
  source: /note="Description of Artificial Sequence: Synthetic Heavy chain variable region CDR H1 ('H1') amino acid sequence"
FSFRSYSMN

SEQ ID NO: 2188 - protein, 17 aa, Artificial Sequence
  source: /note="Description of Artificial Sequence: Synthetic Heavy chain variable region CDR H2 ('H2') amino acid sequence"
SISASSNYINYADSVKG

SEQ ID NO: 2189 - protein, 15 aa, Artificial Sequence
  source: /note="Description of Artificial Sequence: Synthetic Heavy chain variable region CDR H3 ('H3') amino acid sequence"
ARDLLPVERGPAFDI

SEQ ID NO: 2190 - DNA, 333 bp, Artificial Sequence; identical to SEQ ID NO: 2150
  source: /note="Description of Artificial Sequence: Synthetic Light chain variable region('LC') nucleic acid sequence"

SEQ ID NO: 2191 - protein, 111 aa, Artificial Sequence; identical to SEQ ID NO: 2151
  source: /note="Description of Artificial Sequence: Synthetic Light chain variable region ('LC') amino acid sequence"

SEQ ID NO: 2192 - protein, 14 aa, Artificial Sequence
  source: /note="Description of Artificial Sequence: Synthetic Light chain variable region CDR L1 ('L1') amino acid sequence"
TGSSSNIGRGYDVH

SEQ ID NO: 2193 - protein, 7 aa, Artificial Sequence
  source: /note="Description of Artificial Sequence: Synthetic Light chain variable region CDR L2 ('L2') amino acid sequence"
ANSNRPS

SEQ ID NO: 2194 - protein, 11 aa, Artificial Sequence
  source: /note="Description of Artificial Sequence: Synthetic Light chain variable region CDR L3 ('L3') amino acid sequence"
QSYDSRLGGSV

SEQ ID NO: 2195 - DNA, 366 bp, Artificial Sequence; identical to SEQ ID NO: 2165
  source: /note="Description of Artificial Sequence: Synthetic Heavy chain variable region ('HC') nucleic acid sequence"

SEQ ID NO: 2196 - protein, 122 aa, Artificial Sequence; identical to SEQ ID NO: 2166
  source: /note="Description of Artificial Sequence: Synthetic Heavy chain variable region ('HC') amino acid sequence"

SEQ ID NO: 2197 - protein, 9 aa, Artificial Sequence
  source: /note="Description of Artificial Sequence: Synthetic Heavy chain variable region CDR H1 ('H1') amino acid sequence"
FSFRSYSMN

SEQ ID NO: 2198 - protein, 17 aa, Artificial Sequence
  source: /note="Description of Artificial Sequence: Synthetic Heavy chain variable region CDR H2 ('H2') amino acid sequence"
SISASSNYINYADSVKG

SEQ ID NO: 2199 - protein, 15 aa, Artificial Sequence
  source: /note="Description of Artificial Sequence: Synthetic Heavy chain variable region CDR H3 ('H3') amino acid sequence"
ARDLLPVERGPAFDI

SEQ ID NO: 2200 - DNA, 333 bp, Artificial Sequence; identical to SEQ ID NO: 2160
  source: /note="Description of Artificial Sequence: Synthetic Light chain variable region('LC') nucleic acid sequence"

SEQ ID NO: 2201 - protein, 111 aa, Artificial Sequence; identical to SEQ ID NO: 2161
  source: /note="Description of Artificial Sequence: Synthetic Light chain variable region ('LC') amino acid sequence"

SEQ ID NO: 2202 - protein, 14 aa, Artificial Sequence
  source: /note="Description of Artificial Sequence: Synthetic Light chain variable region CDR L1 ('L1') amino acid sequence"
TGSSSNIGAGYDVH

SEQ ID NO: 2203 - protein, 7 aa, Artificial Sequence
  source: /note="Description of Artificial Sequence: Synthetic Light chain variable region CDR L2 ('L2') amino acid sequence"
RNSNRPS

SEQ ID NO: 2204 - protein, 11 aa, Artificial Sequence
  source: /note="Description of Artificial Sequence: Synthetic Light chain variable region CDR L3 ('L3') amino acid sequence"
QSYDSRLGGSN

SEQ ID NO: 2205 - DNA, 366 bp, Artificial Sequence; identical to SEQ ID NO: 2175
  source: /note="Description of Artificial Sequence: Synthetic Heavy chain variable region ('HC') nucleic acid sequence"

SEQ ID NO: 2206 - protein, 122 aa, Artificial Sequence; identical to SEQ ID NO: 2176
  source: /note="Description of Artificial Sequence: Synthetic Heavy chain variable region ('HC') amino acid sequence"

SEQ ID NO: 2207 - protein, 9 aa, Artificial Sequence
  source: /note="Description of Artificial Sequence: Synthetic Heavy chain variable region CDR H1 ('H1') amino acid sequence"
FSFRSYSMN

SEQ ID NO: 2208 - protein, 17 aa, Artificial Sequence
  source: /note="Description of Artificial Sequence: Synthetic Heavy chain variable region CDR H2 ('H2') amino acid sequence"
SISSSSTYINYADSVKG

SEQ ID NO: 2209 - protein, 15 aa, Artificial Sequence
  source: /note="Description of Artificial Sequence: Synthetic Heavy chain variable region CDR H3 ('H3') amino acid sequence"
ARDLSPVERGPAFDI

SEQ ID NO: 2210 - DNA, 333 bp, Artificial Sequence; identical to SEQ ID NO: 2150
  source: /note="Description of Artificial Sequence: Synthetic Light chain variable region('LC') nucleic acid sequence"

SEQ ID NO: 2211 - protein, 111 aa, Artificial Sequence; identical to SEQ ID NO: 2151
  source: /note="Description of Artificial Sequence: Synthetic Light chain variable region ('LC') amino acid sequence"

SEQ ID NO: 2212 - protein, 14 aa, Artificial Sequence
  source: /note="Description of Artificial Sequence: Synthetic Light chain variable region CDR L1 ('L1') amino acid sequence"
TGSSSNIGRGYDVH

SEQ ID NO: 2213 - protein, 7 aa, Artificial Sequence
  source: /note="Description of Artificial Sequence: Synthetic Light chain variable region CDR L2 ('L2') amino acid sequence"
ANSNRPS

SEQ ID NO: 2214 - protein, 11 aa, Artificial Sequence
  source: /note="Description of Artificial Sequence: Synthetic Light chain variable region CDR L3 ('L3') amino acid sequence"
QSYDSRLGGSV

SEQ ID NO: 2215 - DNA, 366 bp, Artificial Sequence; identical to SEQ ID NO: 2175
  source: /note="Description of Artificial Sequence: Synthetic Heavy chain variable region ('HC') nucleic acid sequence"

SEQ ID NO: 2216 - protein, 122 aa, Artificial Sequence; identical to SEQ ID NO: 2176
  source: /note="Description of Artificial Sequence: Synthetic Heavy chain variable region ('HC') amino acid sequence"

SEQ ID NO: 2217 - protein, 9 aa, Artificial Sequence
  source: /note="Description of Artificial Sequence: Synthetic Heavy chain variable region CDR H1 ('H1') amino acid sequence"
FSFRSYSMN

SEQ ID NO: 2218 - protein, 17 aa, Artificial Sequence
  source: /note="Description of Artificial Sequence: Synthetic Heavy chain variable region CDR H2 ('H2') amino acid sequence"
SISSSSTYINYADSVKG

SEQ ID NO: 2219 - protein, 15 aa, Artificial Sequence
  source: /note="Description of Artificial Sequence: Synthetic Heavy chain variable region CDR H3 ('H3') amino acid sequence"
ARDLSPVERGPAFDI

SEQ ID NO: 2220 - DNA, 333 bp, Artificial Sequence; identical to SEQ ID NO: 2160
  source: /note="Description of Artificial Sequence: Synthetic Light chain variable region('LC') nucleic acid sequence"

SEQ ID NO: 2221 - protein, 111 aa, Artificial Sequence; identical to SEQ ID NO: 2161
  source: /note="Description of Artificial Sequence: Synthetic Light chain variable region ('LC') amino acid sequence"

SEQ ID NO: 2222 - protein, 14 aa, Artificial Sequence
  source: /note="Description of Artificial Sequence: Synthetic Light chain variable region CDR L1 ('L1') amino acid sequence"
TGSSSNIGAGYDVH

SEQ ID NO: 2223 - protein, 7 aa, Artificial Sequence
  source: /note="Description of Artificial Sequence: Synthetic Light chain variable region CDR L2 ('L2') amino acid sequence"
RNSNRPS

SEQ ID NO: 2224 - protein, 11 aa, Artificial Sequence
  source: /note="Description of Artificial Sequence: Synthetic Light chain variable region CDR L3 ('L3') amino acid sequence"
QSYDSRLGGSN

What is claimed is:

1. An isolated antibody or an antigen-binding fragment thereor that specifically binds to Respiratory Syncytial Virus (RSV) F protein (F), wherein at least one of the CDRH1, a CDRH2, a CDRH3, a CDRL1, a CDRL2, and CDRL3 amino acid sequence of the antibody or the antigen-binding fragment thereof is at least 70% identical; at least 75% identical; 80% identical; at least 85% identical; at least 90% identical; at least 95% identical; at least 96% identical; at least 97% identical; at least 98% identical; at least 99%; and/or all percentages of identity in between; to at least one the CDRH1, a CDRH2, a CDRH3, a CDRL1, a CDRL2, and/or a CDRL3 amino acid sequences as disclosed in Table 6 of an antibody selected from Antibody Number 232 through Antibody Number 372 as disclosed in Table 6; and wherein said antibody or the antigen-binding fragment thereof also has one or more of the following characteristics:
a) the antibody or antigen-binding fragment thereof cross-competes with said antibody ar antigen-binding fragment thereof for binding to RSV-F;
b) the antibody or antigen-binding fragment thereof displays better binding affinity for the PreF form of RSV-F relative to the PostF form;
c) the antibody or antigen-binding fragment thereof displays a clean or low polyreactivity profile;
d) the antibody or antigen-binding fragment thereof displays neutralization activity toward RSV subtype A and RSV subtype B in vitro;
e) the antibody or antigen-binding fragment thereof displays antigenic site specificity for RSV-F at Site Ø, Site I, Site II, Site III, Site IV, or Site V;
f) the antibody or antigen-binding fragment thereof displays antigenic site specificity for RSV-F Site Ø, Site V, or Site III relative to RSV-F Site I, Site II, or Site IV;
g) at least a portion of the epitope with which the antibody or antigen-binding fragment thereof interacts comprises the α3 helix and β3/β4 hairpin of PreF;
h) the antibody or antigen-binding fragment thereof displays an in vitro neutralization potency (IC₅₀) of between about 0.5 microgram/milliliter (ug/ml) to about 5 ug/ml; between about 0.05 ug/ml to about 0.5 ug/ml; or less than about 0.05 mg/ml;
i) the binding affinity and/or epitopic specificity of the antibody or antigen-binding fragment thereof for any one of the RSV-F variants designated as 1, 2, 3, 4, 5, 6, 7, 8, 9, and DG in FIG. 7A is reduced or eliminated relative to the binding affinity and/or epitopic specificity of said antibody or antigen-binding fragment thereof for the RSV-F or RSV-F DS-Cav1;
j) the antibody or antigen-binding fragment thereof of displays a cross-neutalization potency (IC₅₀) against human metapneumovirus (HMPV);
k) the antibody or antigen-binding fragment thereof does not complete with D25, MPE8, palivisumab, motavizumab, or AM-14; or
l) the antibody or antigen-binding fragment thereof displays at least about 2-fold; at least about 3-fold; at least about 4-fold; at least about 5-fold; at least about 6-fold; at least about 7-fold; at least about 8-fold; at least about 9-fold; at least about 10-fold; at least about 15-fold; at least about 20-fold; at least about 25-fold; at least about 30-fold; at least about 35-fold; at least about 40-fold; at least about 50-fold; at least about 55-fold; at least about 60-fold; at least about 70-fold; at least about 80-fold; at least about 90-fold; at least about 100-fold; greater than about 100-fold; and folds in between any of the foregoing; greater neutralization potency (IC50) than D25 and/or palivizumab.

2. The isolated antibody or antigen-binding fragment thereof of claim 1, wherein the antibody or antigen-binding fragment thereof comprises: at least two; at least three; at least 4; at least 5; at least 6; at least 7; at least 8; at least 9; at least 10; at least 11; or at least 12; of characteristics a) through l).

3. The isolated antibody or antigen-binding fragment thereof of claim 1 or 2, wherein the antibody or antigen-binding fragment thereof comprises:
a) the CDRH3 amino acid sequence of any one of the antibodies designated Antibody Number 232 through Antibody Number 372 as disclosed in Table 6;
b) the CDRH2 amino acid sequence of any one of the antibodies designated Antibody Number 232 through Antibody Number 372 as disclosed in Table 6;
c) the CDRH1 amino acid sequence of any one of the antibodies designated Antibody Number 232 through Antibody Number 372 as disclosed in Table 6;
d) the CDRL3 amino acid sequence of any one of the antibodies designated Antibody Number 232 through Antibody Number 372 as disclosed in Table 6;
e) the CDRL2 amino acid sequence of any one of the antibodies designated Antibody Number 232 through Antibody Number 372 as disclosed in Table 6;
f) the CDRL1 amino acid sequence of any one of the antibodies designated Antibody Number 232 through Antibody Number 372 as disclosed in Table 6; or
g) any combination of two or more of a), b), c), d), e), and f).

4. The isolated antibody or antigen-binding fragment thereof of any one of claims 1 through 3, wherein the antibody or antigen-binding fragment thereof comprises:
a) a heavy chain (HC) amino acid sequence of any one of the antibodies designated Antibody Number 232 through Antibody Number 372 as disclosed in Table 6; and/or
b) a light chain (LC) amino acid sequence of any one of the antibodies designated Antibody Number 232 through Antibody Number 372 as disclosed in Table 6.

5. The isolated antibody or antigen-binding fragment thereof of any one of claims 1 through 4, wherein the antibody is selected from the group consisting antibodies that are at least 70% identical; at least 75% identical; 80% identical; at least 85% identical; at least 90% identical; at least 95% identical; at least 96% identical; at least 97% identical; at least 98% identical; at least 99%; and/or all percentages of identity in between; to any one of the antibodies designated as Antibody Number 232 through Antibody Number 372 as disclosed in Table 6.

6. The isolated antibody or antigen-binding fragment thereof of any one of claims 1 through 5, wherein the antibody is selected from the group consisting of the antibodies designated as Antibody 232 through Antibody Number 372 as disclosed in Table 6.

7. An isolated nucleic acid sequence encoding an antibody or antigen-binding fragment thereof according to any one of claims 1 through 6.

8. An expression vector comprising the isolated nucleic acid sequence according to claim 7.

9. A host cell transfected, transformed, or transduced with the nucleic acid sequence according to claim 7 or the expression vector according to claim 8.

10. A pharmaceutical composition comprising: one or more of the isolated antibodies or antigen-binding fragments thereof according to any one of claims 1 through 6; and a pharmaceutically acceptable carrier and/or excipient.

11. A pharmaceutical composition comprising: one or more nucleic acid sequences according to claim 7; or one or more the expression vectors according to claim 8; and a pharmaceutically acceptable carrier and/or excipient.

12. A transgenic organism comprising the nucleic acid sequence according to claim 7; or the expression vector according to claim 8.

13. A method of treating or preventing a Respiratory Syncytial Virus (RSV) infection, are at least one symptom associated with RSV infection, comprising administering to a patient in need thereof or suspected of being in need thereof:
a) one or more antibodies or antigen-binding fragments thereof according to any of claims 1 through 6;
b) a nucleic acid sequences according to claim 7;
c) an expression vector according to claim 8;
d) a host cell according to claim 9; or
e) a pharmaceutical composition according claim 10 or claim 11; such that the RSV infection is treated or prevented, or the at least on symptom associated with RSV infection is treated, alleviated, or reduced in severity.

14. A method of treating or preventing either a Respiratory Syncytial Virus (RSV) infection or a human metapneumovirus (HMPV) infection, are at least one symptom associated with said RSV infection or said HMPV infection, comprising administering to a patient in need thereof or suspected of being in need thereof:
a) one or more antibodies or antigen-binding fragments thereof according to any of claims 1 through 6;
b) a nucleic acid sequences according to claim 7;
c) an expression vector according to claim 8;
d) a host cell according to claim 9; or
e) a pharmaceutical composition according claim 10 or claim 11; such that the RSV infection is treated or prevented, or the at least on symptom associated with RSV infection is treated, alleviated, or reduced in severity.

15. The method according to claim 14, wherein the one or more antibodies or antigen-binding fragments thereof comprises Antibody Number 340.

16. The method according to any one of claims 13 through 15, wherein the method further comprises administering to the patient a second therapeutic agent.

17. The method according to claim 16, wherein the second therapeutic agent is selected group consisting of: an antiviral agent; a vaccine specific for RSV, a vaccine specific for influenza virus, or a vaccine specific for metapneumovirus (MPV); an siRNA specific for an RSV antigen or a metapneumovirus (MPV) antigen; a second antibody specific for an RSV antigen or a metapneumovirus (MPV) antigen; an anti-IL4R antibody, an antibody specific for an influenza virus antigen, an anti-RSV-G antibody and a NSAID.

18. A pharmaceutical composition comprising any one or more of the isolated antibodies or antigen-binding fragments thereof of any one of claims 1 through 7 and a pharmaceutically acceptable carrier and/or excipient.

19. The pharmaceutical composition according to claim 18 for use in preventing a respiratory syncytial virus (RSV) infection in a patient in need thereof or suspected of being in need thereof, or for treating a patient suffering from an RSV infection, or for ameliorating at least one symptom or complication associated with the infection, wherein the infection is either prevented, or at least one symptom or complication associated with the infection is prevented, ameliorated, or lessened in severity and/or duration as a result of such use.

20. The pharmaceutical composition according to claim 18 for us in treating or preventing either a Respiratory Syncytial Virus (RSV) infection or a human metapneumovirus (HMPV) infection, ar at least one symptom associated with said RSV infection or said HMPV infection, in a patient in need thereof or suspected of being in need thereof, wherein the infection is either prevented, or at least one symptom or complication associated with the infection is prevented, ameliorated, or lessened in severity and/or duration as a result of such use.

21. Use of the pharmaceutical composition of claim 18 in the manufacture of a medicament for preventing a respiratory syncytial virus (RSV) infection in a patient in need thereof, or for treating a patient suffering from an RSV infection, or for ameliorating at least one symptom or complication associated with the infection, wherein the infection is either prevented, or at least one symptom or complication associated with the infection is prevented, ameliorated, or lessened in severity and/or duration.

22. Use of the pharmaceutical composition of claim 18 in the manufacture of a medicament for preventing either a Respiratory Syncytial Virus (RSV) infection or a human metapneumovirus (HMPV) infection, are at least one symptom associated with said RSV infection or said HMPV infection, in a patient in need thereof or suspected of being in need thereof, wherein the infection is either prevented, or at least one symptom or complication associated with the infection is prevented, ameliorated, or lessened in severity and/or duration as a result of such use.
